(19) United States
(12) Patent Application Publication
(10) Pub. No.: US 2024/0175013 A1
(43) Pub. Date: May 30, 2024

(54) BIALLELIC KNOCKOUT OF TRAC

(71) Applicant: EmendoBio Inc., Wilmington, DE (US)

(72) Inventors: Lior Izhar, Tel Aviv (IL); Rafi Emmanuel, Ramla (IL)

(73) Assignee: EmendoBio Inc., Wilmington, DE (US)

(21) Appl. No.: 18/257,176

(22) PCT Filed: Dec. 14, 2021
(86) PCT No.: PCT/US2021/063290

§ 371 Date: Jun. 13, 2023

Related U.S. Application Data
(60) Provisional application No. 63/147,168, filed on Feb. 8, 2021.
(60) Provisional application No. 63/125,200, filed on Dec. 14, 2020.

(51) Int. Cl. C12N 15/11; C12N 5/0783; C12N 9/22

(52) U.S. Cl. CPC C12N 15/111; C12N 5/0636; C12N 9/22; C12N 2310/20; C12N 2320/30

(57) ABSTRACT

RNA molecules comprising a guide sequence portion having 17-50 contiguous nucleotides containing nucleotides in the sequence set forth in any one of SEQ ID NOs: 1-1932 and compositions, methods, and uses thereof.

[0001] This application claims the benefit of U.S. Provisional Application Nos. 63/147,168, filed Feb. 8, 2021, and 63/125,200, filed Dec. 14, 2020, the contents of each of which are hereby incorporated by reference.

[0002] Throughout this application, various publications are referenced, including referenced in parenthesis. The disclosures of all publications mentioned in this application in their entireties are hereby incorporated by reference into this application in order to provide additional description of the art to which this invention pertains and of the features in the art which can be employed with this invention.

### REFERENCE TO SEQUENCE LISTING

[0003] This application incorporates-by-reference nucleotide sequences which are present in the file named “211214_91653-A-PCT_Sequence_Listing_AWG.txt”, which is 1,124 kilobytes in size, and which was created on Dec. 14, 2021 in the IBM-PC machine format, having an operating system compatibility with MS-Windows, which is contained in the text file filed Dec. 14, 2021 as part of this application.

### BACKGROUND OF INVENTION

[0004] Chimeric antigen receptors (CAR) provide a promising approach for immunotherapy. However, to make such therapies (e.g. CAR-T cell therapies) more accessible, it is highly desirable to develop an allogeneic adoptive transfer strategy in which universal CAR cells derived from cells from healthy donors can be applied to treat multiple patients. In order to implement this strategy, the αβ T-cell receptor (TCR) on allogenic CAR-T cells needs to be eliminated by knocking out T Cell Receptor Alpha Constant (TRAC) in order to avoid graft-versus-host-disease (GVHD). Additionally, to minimize the immunogenicity of CAR-T cells human leukocyte antigens class I (HLA-Is) may need to be removed by knocking out beta-2 microglobulin (B2M).

### SUMMARY OF THE INVENTION

[0005] Disclosed are approaches for knocking out the TRAC gene on CAR-T cells to avoid graft-versus-host-disease (GVHD) during allogeneic adoptive transfer. Accordingly, biallelic knockout of the TRAC gene in cells as described herein may be utilized to minimize their immunogenicity.

[0006] The present disclosure also provides a method for inactivating alleles of the T Cell Receptor Alpha Constant (TRAC) gene in a cell, the method comprising
[0007] introducing to the cell a composition comprising:
   [0008] a CRISPR nuclease or a sequence encoding the CRISPR nuclease; and
   [0009] an RNA molecule comprising a guide sequence portion having 17-50 nucleotides or a nucleotide sequence encoding the same,

[0010] wherein a complex of the CRISPR nuclease and the RNA molecule affects a double strand break in the allele of the TRAC gene.

[0011] According to embodiments of the present invention, there is provided an RNA molecule comprising a guide sequence portion having 17-50 contiguous nucleotides containing nucleotides in the sequence set forth in any one of SEQ ID Nos: 1-1932.

[0012] According to some embodiments of the present invention, there is provided a composition comprising an RNA molecule comprising a guide sequence portion having 17-50 contiguous nucleotides containing nucleotides in the sequence set forth in any one of SEQ ID NOs: 1-1932 and a CRISPR nuclease.

[0013] According to some embodiments of the present invention, there is provided a method for inactivating a TRAC allele in a cell, the method comprising delivering to the cell a composition comprising an RNA molecule comprising a guide sequence portion having 17-50 contiguous nucleotides containing nucleotides in the sequence set forth in any one of SEQ ID NOs: 1-1932 and a CRISPR nuclease. In some embodiments, the cell is a lymphocyte. In some embodiments, the cell is a T cell. In some embodiments, the cell is a T regulatory cell. In some embodiments, the cell is a stem cell. In some embodiments, the cell is an induced pluripotent stem cell (iPSC). In some embodiments, the cell is a fibroblast, blood cell, hepatocyte, keratinocyte, or any other cell type capable of being reprogrammed to an induced pluripotent stem cell (iPSC). In some embodiments, the delivering to the cell is performed in vivo, ex vivo, or in vitro. In some embodiments, the method is performed ex vivo and the cell is provided/explanted from an individual patient. In some embodiments, the method further comprises the step of introducing the resulting cell, with the modified/knocked out TRAC allele, into the individual patient or a different individual patient. Each possibility represents a separate embodiment. In some embodiments, the cell is originated from the individual patient to be treated. In some embodiments, the cell is originated from a donor. In some embodiments, the cell is allogeneic to the individual patient to which it is introduced.

[0014] According to some embodiments of the present invention, there is provided a method for treating and/or preventing graft-versus-host-disease (GVHD), the method comprising delivering to a cell of a subject having or at risk of experiencing graft-versus-host-disease (GVHD) a composition comprising an RNA molecule comprising a guide sequence portion having 17-50 contiguous nucleotides containing nucleotides in the sequence set forth in any one of SEQ ID NOs: 1-1932 and a CRISPR nuclease. In some embodiments, the method is for increasing persistence and/or engraftment of a cell in a host subject, the method comprising delivering to the cell a composition comprising an RNA molecule comprising a guide sequence portion having 17-50 contiguous nucleotides containing nucleotides in the sequence set forth in any one of SEQ ID NOs: 1-1932 and a CRISPR nuclease: and introducing the cell to the host subject. In some embodiments, the cell is further engineered to express a chimeric antigen receptor. In some embodiments, the cell is further engineered to knockout B2M gene to avoid host versus graft response following introduction into a host subject. In some embodiments, the cell is a stem cell or an iPSC or a progenitor cell and is differentiated to a T cell prior to introducing the cell to the host subject.

[0015] According to some embodiments of the present invention, there is provided use of a composition comprising an RNA molecule comprising a guide sequence portion having 17-50 contiguous nucleotides containing nucleotides in the sequence set forth in any one of SEQ ID NOs: 1-1932 and a CRISPR nuclease for inactivating a TRAC allele in a cell, comprising delivering to the cell the composition comprising an RNA molecule comprising a guide sequence portion having 17-50 contiguous nucleotides containing nucleotides in the sequence set forth in any one of SEQ ID NOs: 1-1932 and a CRISPR nuclease.

[0016] According to embodiments of the present invention, there is provided a medicament comprising an RNA molecule comprising a guide sequence portion having 17-50 contiguous nucleotides containing nucleotides in the sequence set forth in any one of SEQ ID NOs: 1-1932 and a CRISPR nuclease for use in inactivating a TRAC allele in a cell, wherein the medicament is administered by delivering to the cell the composition comprising an RNA molecule comprising a guide sequence portion having 17-50 contiguous nucleotides containing nucleotides in the sequence set forth in any one of SEQ ID NOs: 1-1932 and a CRISPR nuclease.

[0017] According to some embodiments of the present invention, there is provided use of a composition comprising an RNA molecule comprising a guide sequence portion having 17-50 contiguous nucleotides containing nucleotides in the sequence set forth in any one of SEQ ID NOs: 1-1932 and a CRISPR nuclease for treating, ameliorating, or preventing graft-versus-host-disease (GVHD), comprising delivering to a cell of a subject having or at risk of experiencing graft-versus-host-disease (GVHD) the composition of comprising an RNA molecule comprising a guide sequence portion having 17-50 contiguous nucleotides containing nucleotides in the sequence set forth in any one of SEQ ID NOs: 1-1932 and a CRISPR nuclease.

[0018] According to some embodiments of the present invention, there is provided a medicament comprising the composition comprising an RNA molecule comprising a guide sequence portion having 17-50 contiguous nucleotides containing nucleotides in the sequence set forth in any one of SEQ ID NOs: 1-1932 and a CRISPR nuclease for use in treating, ameliorating, or preventing graft-versus-host-disease (GVHD), wherein the medicament is administered by delivering to a cell of a subject having or at risk of experiencing graft-versus-host-disease (GVHD) the composition comprising an RNA molecule comprising a guide sequence portion having 17-50 contiguous nucleotides containing nucleotides in the sequence set forth in any one of SEQ ID NOs: 1-1932 and a CRISPR nuclease.

[0019] According to some embodiments of the present invention, there is provided a kit for inactivating a TRAC allele in a cell, comprising an RNA molecule comprising a guide sequence portion having 17-50 contiguous nucleotides containing nucleotides in the sequence set forth in any one of SEQ ID NOs: 1-1932, a CRISPR nuclease, and/or a tracrRNA molecule; and instructions for delivering the RNA molecule: CRISPR nuclease, and/or the tracrRNA to the cell

[0020] According to some embodiments of the present invention, there is provided a kit for treating or preventing graft-versus-host-disease (GVHD)in a subject, comprising an RNA molecule comprising a guide sequence portion having 17-50 contiguous nucleotides containing nucleotides in the sequence set forth in any one of SEQ ID NOs: 1-1932, a CRISPR nuclease, and/or a tracrRNA molecule; and instructions for delivering the RNA molecule; CRISPR nuclease, and/or the tracrRNA to a cell of a subject having or at risk of graft-versus-host-disease (GVHD).

### BRIEF DESCRIPTION OF THE DRAWINGS

[0021] FIG. 1: Percent editing of various OMNI nucleases with various RNA spacers, or guide sequence portions, which target the TRAC gene and are described in Table 5.

[0022] FIG. 2: Guide activity of OMNI-103 CRISPR nuclease guides targeting TRAC in HeLa cells. Specific guides were-co-transfected with OMNI-103 to determine their on-target activity. Cells were harvested 72 h post DNA transfection, genomic DNA was extracted, and the region of the mutation was amplified and analyzed by NGS. Transfection efficiency is measured by mCherry fluorescence. Bars represent % editing, dots represent % mCherry. The graph represents the % of editing±standard deviation (STDV) (performed in triplicate).

[0023] FIG. 3: OMNI-93 and OMNI-103 CRISPR nuclease TRAC editing activity as ribonucleoprotein (RNP) in U2OS a cell system. RNPs complexes of OMNI-93 and OMNI-103 and a specific guide molecule were electroporated into U2OS cells to determine their editing activity. Cells were harvested 72 h post RNP electroporation, genomic DNA was extracted, and the region of the mutation was amplified and analyzed by NGS. The graph represents the % of editing±STDV of two (2) independent electroporations.

[0024] FIG. 4: OMNI-103 CRISPR nuclease editing effect on protein levels of TRAC in primary T cells. RNPs complexes of OMNI-103 and a specific guide molecule were electroporated into activated primary T cells. Cells were harvested 72 hours days post RNP electroporation, and cells were collected and analyzed by a FACS assay.

### DETAILED DESCRIPTION

[0025] Unless otherwise defined, all technical and/or scientific terms used herein have the same meaning as commonly understood by one of ordinary skill in the art to which the invention pertains. Although methods and materials similar or equivalent to those described herein can be used in the practice or testing of embodiments of the invention, exemplary methods and/or materials are described below. In case of conflict, the patent specification, including definitions, will control. In addition, the materials, methods, and examples are illustrative only and are not intended to be necessarily limiting.

[0026] It should be understood that the terms “a” and “an” as used above and elsewhere herein refer to “one or more” of the enumerated components. It will be clear to one of ordinary skill in the art that the use of the singular includes the plural unless specifically stated otherwise. Therefore, the terms “a,” “an” and “at least one” are used interchangeably in this application.

[0027] For purposes of better understanding the present teachings and in no way limiting the scope of the teachings, unless otherwise indicated, all numbers expressing quantities, percentages or proportions, and other numerical values used in the specification and claims, are to be understood as being modified in all instances by the term “about.” Accordingly, unless indicated to the contrary, the numerical parameters set forth in the following specification and attached claims are approximations that may vary depending upon the desired properties sought to be obtained. At the very least, each numerical parameter should at least be construed in light of the number of reported significant digits and by applying ordinary rounding techniques.

[0028] Unless otherwise stated, adjectives such as “substantially” and “about” modifying a condition or relationship characteristic of a feature or features of an embodiment of the invention, are understood to mean that the condition or characteristic is defined to within tolerances that are acceptable for operation of the embodiment for an application for which it is intended. Unless otherwise indicated, the word “or” in the specification and claims is considered to be the inclusive “or” rather than the exclusive or, and indicates at least one of, or any combination of items it conjoins.

[0029] In the description and claims of the present application, each of the verbs, “comprise,” “include” and “have” and conjugates thereof, are used to indicate that the object or objects of the verb are not necessarily a complete listing of components, elements or parts of the subject or subjects of the verb. Other terms as used herein are meant to be defined by their well-known meanings in the art.

[0030] In some embodiments of the present invention, a DNA nuclease is utilized to affect a DNA break at a target site to induce cellular repair mechanisms, for example, but not limited to, non-homologous end-joining (NHEJ). During classical NHEJ, two ends of a double-strand break (DSB) site are ligated together in a fast but also inaccurate manner (i.e. frequently resulting in mutation of the DNA at the cleavage site in the form of small insertion or deletions).

[0031] As used herein, the term “modified cells” refers to cells in which a double strand break is affected by a complex of an RNA molecule and the CRISPR nuclease as a result of hybridization with the target sequence, i.e. on-target hybridization.

[0032] This invention provides a modified cell or cells obtained by use of any of the methods described herein. In an embodiment these modified cell or cells are capable of giving rise to progeny cells. In an embodiment these modified cell or cells are capable of giving rise to progeny cells after engraftment. As a non-limiting example, the modified cells may be hematopoietic stem cells (HSCs), or any cell suitable for an allogenic cell transplant or autologous cell transplant.

[0033] As used herein, the term “targeting sequence” or “targeting molecule” refers a nucleotide sequence or molecule comprising a nucleotide sequence that is capable of hybridizing to a specific target sequence, e.g., the targeting sequence has a nucleotide sequence which is at least partially complementary to the sequence being targeted along the length of the targeting sequence. The targeting sequence or targeting molecule may be part of an RNA molecule that can form a complex with a CRISPR nuclease, either alone or in combination with other RNA molecules, with the targeting sequence serving as the targeting portion of the CRISPR complex. When the molecule having the targeting sequence is present contemporaneously with the CRISPR nuclease, the RNA molecule, alone or in combination with an additional one or more RNA molecules (e.g. a tracrRNA molecule), is capable of targeting the CRISPR nuclease to the specific target sequence. As non-limiting example, a guide sequence portion of a CRISPR RNA molecule or single-guide RNA molecule may serve as a targeting molecule. Each possibility represents a separate embodiment. A targeting sequence can be custom designed to target any desired sequence.

[0034] The term “targets” as used herein, refers to preferentially hybridizing a targeting sequence of a targeting molecule to a nucleic acid having a targeted nucleotide sequence. It is understood that the term “targets” encompasses variable hybridization efficiencies, such that there is preferential targeting of the nucleic acid having the targeted nucleotide sequence, but unintentional off-target hybridization in addition to on-target hybridization might also occur. It is understood that where an RNA molecule targets a sequence, a complex of the RNA molecule and a CRISPR nuclease molecule targets the sequence for nuclease activity.

[0035] The “guide sequence portion” of an RNA molecule refers to a nucleotide sequence that is capable of hybridizing to a specific target DNA sequence, e.g., the guide sequence portion has a nucleotide sequence which is partially or fully complementary to the DNA sequence being targeted along the length of the guide sequence portion. In some embodiments. the guide sequence portion is 17, 18, 19, 20, 21, 22, 23, 24, 25, 26, 27, 28, 29, 30, 31, 32, 33, 34, 35, 36, 37, 38, 39, 40, 41, 42, 43, 44, 45, 46, 47, 48, 49 or 50 nucleotides in length, or approximately 17-50, 17-49, 17-48, 17-47, 17-46, 17-45, 17-44, 17-43, 17-42, 17-41, 17-40, 17-39, 17-38, 17-37, 17-36, 17-35, 17-34, 17-33, 17-31, 17-50, 17-29, 17-28, 17-27, 17-26, 17-25, 17-24, 17-22, 17-21, 18-25, 18-24, 18-23, 18-22, 18-21, 19-25, 19-24, 19-23, 19-22, 19-21, 19-20, 20-22, 18-20, 20-21, 21-22, or 17-20 nucleotides in length. Preferably, the entire length of the guide sequence portion is fully complementary to the DNA sequence being targeted along the length of the guide sequence portion. The guide sequence portion may be part of an RNA molecule that can form a complex with a CRISPR nuclease with the guide sequence portion serving as the DNA targeting portion of the CRISPR complex. When the RNA molecule having the guide sequence portion is present contemporaneously with the CRISPR molecule, alone or in combination with an additional one or more RNA molecules (e.g. a tracrRNA molecule), the RNA molecule is capable of targeting the CRISPR nuclease to the specific target DNA sequence. Accordingly, a CRISPR complex can be formed by direct binding of the RNA molecule having the guide sequence portion to a CRISPR nuclease or by binding of the RNA molecule having the guide sequence portion and an additional one or more RNA molecules to the CRISPR nuclease. Each possibility represents a separate embodiment. A guide sequence portion can be custom designed to target any desired sequence. Accordingly, a molecule comprising a “guide sequence portion” is a type of targeting molecule. In some embodiments, the guide sequence portion comprises a sequence that is the same as, or differs by no more than 1, 2, 3, 4, or 5 nucleotides from, a guide sequence portion described herein, e.g., a guide sequence set forth in any of SEQ ID NOs: 1-1932. Each possibility represents a separate embodiment. In some of these embodiments, the guide sequence portion comprises a sequence that is the same as a sequence set forth in any of SEQ ID NOs: 1-1932. Throughout this application, the terms “guide molecule,” “RNA guide molecule,” “guide RNA molecule,” and “gRNA molecule” are synonymous with a molecule comprising a guide sequence portion.

[0036] The term “non-discriminatory” as used herein refers to a guide sequence portion of an RNA molecule that targets a specific DNA sequence that is common to all alleles of a gene.

[0037] In embodiments of the present invention, an RNA molecule comprises a guide sequence portion having 17-50 contiguous nucleotides containing nucleotides in the sequence set forth in any one of SEQ ID NOs: 1-1932.

[0038] The RNA molecule and or the guide sequence portion of the RNA molecule may contain modified nucleotides. Exemplary modifications to nucleotides/polynucleotides may be synthetic and encompass polynucleotides which contain nucleotides comprising bases other than the naturally occurring adenine, cytosine, thymine, uracil, or guanine bases. Modifications to polynucleotides include polynucleotides which contain synthetic, non-naturally occurring nucleosides e.g., locked nucleic acids. Modifications to polynucleotides may be utilized to increase or decrease stability of an RNA. An example of a modified polynucleotide is an mRNA containing 1-methyl pseudo-uridine. For examples of modified polynucleotides and their uses, see U.S. Pat. No. 8,278,036, PCT International Publication No. WO/2015/006747, and Weissman and Kariko (2015), each of which is hereby incorporated by reference.

[0039] As used herein, “contiguous nucleotides” set forth in a SEQ ID NO refers to nucleotides in a sequence of nucleotides in the order set forth in the SEQ ID NO without any intervening nucleotides.

[0040] In embodiments of the present invention, the guide sequence portion may be 17-50 nucleotides in length and contain 20-22 contiguous nucleotides in the sequence set forth in any one of SEQ ID NOs: 1-1932. In embodiments of the present invention, the guide sequence portion may be less than 22 nucleotides in length. For example, in embodiments of the present invention the guide sequence portion may be 17, 18, 19, 20, or 21 nucleotides in length. In such embodiments the guide sequence portion may consist of 17, 18, 19, 20, or 21 nucleotides, respectively, in the sequence of 17-22 contiguous nucleotides set forth in any one of SEQ ID NOs: 1-1932. For example, a guide sequence portion having 17 nucleotides in the sequence of 17 contiguous nucleotides set forth in SEQ ID NO: 1933 may consist of any one of the following nucleotide sequences (nucleotides excluded from the contiguous sequence are marked in strike-through):

(SEQ ID NO: 1933)
AAAAAAAUGUACUUGGUUCC
17 nucleotide guide sequence 1:
(SEQ ID NO: 1934) [symbol]
AAAUGUACUUGGUUCC
17 nucleotide guide sequence 2:
(SEQ ID NO: 1935) [symbol]
AAAAAUGUACUUGGUUC [symbol]
17 nucleotide guide sequence 3:
(SEQ ID NO: 1936) [symbol]
AAAAAAUGUACUUGGUU [symbol]
17 nucleotide guide sequence 4:
(SEQ ID NO: 1937)
AAAAAAAUGUACUUGGU

[symbol]

[0041] In embodiments of the present invention, the guide sequence portion may be greater than 20 nucleotides in length. For example, in embodiments of the present invention the guide sequence portion may be 21, 22, 23, 24, 25, 26, 27, 28, 29, or 30 nucleotides in length. In such embodiments the guide sequence portion comprises 17-50 nucleotides containing the sequence of 20, 21 or 22 contiguous nucleotides set forth in any one of SEQ ID NOs: 1-1932 and additional nucleotides fully complimentary to a nucleotide or sequence of nucleotides adjacent to the 3′ end of the target sequence, 5′ end of the target sequence, or both.

[0042] In embodiments of the present invention a CRISPR nuclease and an RNA molecule comprising a guide sequence portion form a CRISPR complex that binds to a target DNA sequence to effect cleavage of the target DNA sequence. CRISPR nucleases, e.g. Cpfl, may form a CRISPR complex comprising a CRISPR nuclease and RNA molecule without a further tracrRNA molecule. Alternatively, CRISPR nucleases, e.g. Cas9, may form a CRISPR complex between the CRISPR nuclease, an RNA molecule, and a tracrRNA molecule. A guide sequence portion, which comprises a nucleotide sequence that is capable of hybridizing to a specific target DNA sequence, and a sequence portion that participates in CRIPSR nuclease binding, e.g. a tracrRNA sequence portion, can be located on the same RNA molecule. Alternatively, a guide sequence portion may be located on one RNA molecule and a sequence portion that participates in CRIPSR nuclease binding, e.g. a tracrRNA portion, may located on a separate RNA molecule. A single RNA molecule comprising a guide sequence portion (e.g. a DNA-targeting RNA sequence) and at least one CRISPR protein-binding RNA sequence portion (e.g. a tracrRNA sequence portion), can form a complex with a CRISPR nuclease and serve as the DNA-targeting molecule. In some embodiments, a first RNA molecule comprising a DNA-targeting RNA portion, which includes a guide sequence portion, and a second RNA molecule comprising a CRISPR protein-binding RNA sequence interact by base pairing to form an RNA complex that targets the CRISPR nuclease to a DNA target site or, alternatively, are fused together to form an RNA molecule that complexes with the CRISPR nuclease and targets the CRISPR nuclease to a DNA target site.

[0043] In embodiments of the present invention, an RNA molecule comprising a guide sequence portion may further comprise the sequence of a tracrRNA molecule. Such embodiments may be designed as a synthetic fusion of the guide portion of the RNA molecule and the trans-activating crRNA (tracrRNA). (See Jinek et al., 2012). In such an embodiment, the RNA molecule is a single guide RNA (sgRNA) molecule. Embodiments of the present invention may also form CRISPR complexes utilizing a separate tracrRNA molecule and a separate RNA molecule comprising a guide sequence portion. In such embodiments the tracrRNA molecule may hybridize with the RNA molecule via basepairing and may be advantageous in certain applications of the invention described herein.

[0044] The term “tracr mate sequence” refers to a sequence sufficiently complementary to a tracrRNA molecule so as to hybridize to the tracrRNA via basepairing and promote the formation of a CRISPR complex. (See U.S. Pat. No. 8,906,616). In embodiments of the present invention, the RNA molecule may further comprise a portion having a tracr mate sequence.

[0045] A “gene,” for the purposes of the present disclosure, includes a DNA region encoding a gene product, as well as all DNA regions which regulate the production of the gene product, whether or not such regulatory sequences are adjacent to coding and/or transcribed sequences. Accordingly, a gene includes, but is not necessarily limited to, promoter sequences, terminators, translational regulatory sequences such as ribosome binding sites and internal ribosome entry sites, enhancers, silencers, insulators, boundary elements, replication origins, matrix attachment sites and locus control regions.

[0046] “Eukaryotic” cells include, but are not limited to, fungal cells (such as yeast), plant cells, animal cells, mammalian cells and human cells.

[0047] The term “nuclease” as used herein refers to an enzyme capable of cleaving the phosphodiester bonds between the nucleotide subunits of nucleic acid. A nuclease may be isolated or derived from a natural source. The natural source may be any living organism. Alternatively, a nuclease may be a modified or a synthetic protein which retains the phosphodiester bond cleaving activity. Gene modification can be achieved using a nuclease, for example a CRISPR nuclease.

[0048] According to embodiments of the present invention, there is provided a method for inactivating alleles of the T Cell Receptor Alpha Constant (TRAC) gene in a cell, the method comprising
[0049] introducing to the cell a composition comprising:
   [0050] at least one CRISPR nuclease, or a sequence encoding a CRISPR nuclease; and
   [0051] an RNA molecule comprising a guide sequence portion,

[0052] wherein a complex of the CRISPR nuclease and the RNA molecule affects a double strand break in alleles of the TRAC gene,

[0053] wherein the guide sequence portion of the RNA molecule comprises 17-50 contiguous nucleotides containing nucleotides in the sequence set forth in any one of SEQ ID NOs: 1-1932.

[0054] In some embodiments, the guide sequence portion of the RNA molecule comprises 17-50 contiguous nucleotides containing nucleotides in the sequence set forth in any one of SEQ ID NOs: 1-1538 modified to comprise up to five mismatches relative to the target site.

[0055] In some embodiments, the method is a method of preparing modified immune cells (e.g., T cells) for use in immunotherapy. In some embodiments, the method is performed in vitro or ex vivo.

[0056] In some embodiments, the composition is introduced to a cell in a subject or to a cell in culture.

[0057] In some embodiments, the cell is a lymphocyte, a T cell, a T regulatory cell, a stem cell, or a fibroblast, blood cell, hepatocyte, keratinocyte, or any other cell type capable of being reprogrammed to an induced pluripotent stem cell (iPSC).

[0058] In some embodiments, the cell is a hematopoietic stem cell (HSC), induced pluripotent stem cell (iPS cell), iPSc-derived cell, natural killer cell (NK), iPS-derived NK cell (iNK), T cell, innate-like T cell (iT), natural killer T cell (NKT), γ δ T cell, iPSc-derived T cell, invariant NKT cells (iNKT), iPSc-derived NKT, monocyte, or macrophage.

[0059] In some embodiments, the CRISPR nuclease and the RNA molecule are introduced to the cell at substantially the same time or at different times.

[0060] In some embodiments, alleles of the TRAC gene in the cell are subjected to an insertion or deletion mutation.

[0061] In some embodiments, the insertion or deletion mutation creates an early stop codon.

[0062] In some embodiments, the inactivating results in a truncated protein encoded by the mutated allele.

[0063] In some embodiments, the composition introduced to the cell further comprises a second RNA molecule comprising a guide sequence portion, wherein the guide sequence portion of the RNA molecule comprises 17-50 contiguous nucleotides containing nucleotides in the sequence set forth in any one of SEQ ID NOs: 1-1932.

[0064] According to embodiments of the present invention, there is provided a method for inactivating alleles of the T Cell Receptor Alpha Constant (TRAC) gene in a cell, the method comprising
[0065] introducing to the cell a composition comprising:
   [0066] at least one CRISPR nuclease, or a sequence encoding a CRISPR nuclease; and
   [0067] an RNA molecule comprising a guide sequence portion,

[0068] wherein a complex of the CRISPR nuclease and the RNA molecule affects a double strand break in alleles of the TRAC gene,

[0069] wherein the guide sequence portion of the RNA molecule comprises 17-50 contiguous nucleotides containing nucleotides in the sequence set forth in any one of SEQ ID NOs: 1-1932 modified to contain 1, 2, 3, 4, or 5 nucleotide mismatches relative to a fully-complementary target sequence of the guide sequence portion.

[0070] In some embodiments, the guide sequence portion of the RNA molecule comprises 1, 2, 3, 4, or 5 nucleotide mismatches relative to a fully-complementary target sequence of the guide sequence portion.

[0071] In some embodiments, the guide sequence portion having a mismatch provides higher targeting specificity to the complex of the CRISPR nuclease and the RNA molecule relative to a guide sequence portion that has higher complementarity to an allele of the TRAC gene.

[0072] In some embodiments, the composition introduced to the cell further comprises a second RNA molecule comprising a guide sequence portion, wherein the guide sequence portion of the RNA molecule comprises 17-50 contiguous nucleotides containing nucleotides in the sequence set forth in any one of SEQ ID NOs: 1-1932, or any one of SEQ ID NOs: 1-1932 modified to contain 1, 2, 3, 4, or 5 nucleotide mismatches relative to a fully-complementary target sequence of the guide sequence portion.

[0073] According to embodiments of the present invention, there is provided a composition comprising an RNA molecule which comprises 17-50 contiguous nucleotides containing nucleotides in the sequence set forth in any one of SEQ ID NOs: 1-1932.

[0074] In some embodiments, the RNA molecule comprises 17-50 contiguous nucleotides containing nucleotides in the sequence set forth in any one of SEQ ID NOs: 459, 482, 499, 608, 696, 719, 724, 1590, 1596, 1620, 1671, 1673, 1690 and 1723.

[0075] In some embodiments, the RNA molecule comprises 17-50 contiguous nucleotides containing nucleotides in the sequence set forth in any one of SEQ ID NOs: 1-1932 other than SEQ ID NOs: 459, 482, 499, 608, 696, 719, 724, 1590, 1596, 1620, 1671, 1673, 1690 and 1723.

[0076] In some embodiments, the composition further comprises a second RNA molecule which comprises 17-50 contiguous nucleotides containing nucleotides in the sequence set forth in any one of SEQ ID NOs: 1-1932, or any one of SEQ ID NOs: 1-1932 modified to contain 1, 2, 3, 4, or 5 nucleotide mismatches relative to a fully-complementary target sequence of the guide sequence portion.

[0077] In some embodiments, the second RNA molecule which comprises 17-50 contiguous nucleotides containing nucleotides in the sequence set forth in any one of SEQ ID NOs: 459, 482, 499, 608, 696, 719, 724, 1590, 1596, 1620, 1671, 1673, 1690 and 1723.

[0078] In some embodiments, the second RNA molecule which comprises 17-50 contiguous nucleotides containing nucleotides in the sequence set forth in any one of SEQ ID NOs: 1-1932 is other than SEQ ID NOs: 459, 482, 499, 608, 696, 719, 724, 1590, 1596, 1620, 1671, 1673, 1690 and 1723.

[0079] According to embodiments of the present invention, there is provided a composition comprising an RNA molecule which comprises 17-50 contiguous nucleotides containing nucleotides in the sequence set forth in any one of SEQ ID NOs: 1-1932, or any one of SEQ ID NOs: 1-1932 modified to contain 1, 2, 3, 4, or 5 nucleotide mismatches relative to a fully-complementary target sequence of the guide sequence portion.

[0080] In some embodiments, the composition further comprises a second RNA molecule which comprises 17-50 contiguous nucleotides containing nucleotides in the sequence set forth in any one of SEQ ID NOs: 1-1932, or any one of SEQ ID NOs: 1-1932 modified to contain 1, 2, 3, 4, or 5 nucleotide mismatches relative to a fully-complementary target sequence of the guide sequence portion.

[0081] In some embodiments, any one of the compositions described above further comprises a CRISPR nuclease.

[0082] In some embodiments, any one of the compositions described above further comprises a tracrRNA molecule.

[0083] According to embodiments of the present invention, there is provided a cell modified by any one of the methods described herein or modified using the any one of the compositions described herein. The modified cell may also have additional genes altered in order to improve their use for adoptive transfer, for example, reducing or preventing host-versus-graft disease (HvD).

[0084] In some embodiments, the cell is any one of a wherein the cell is a lymphocyte, a T cell, a T regulatory cell, a stem cell, or a fibroblast, blood cell, hepatocyte, keratinocyte, or any other cell type capable of being reprogrammed to an induced pluripotent stem cell (iPSC).

[0085] In some embodiments, the cell is a hematopoietic stem cell (HSC), induced pluripotent stem cell (iPS cell), iPSc-derived cell, natural killer cell (NK), iPS-derived NK cell (iNK), T cell, innate-like T cell (iT), natural killer T cell (NKT), γ δ T cell, iPSc-derived T cell, invariant NKT cell (iNKT), iPSc-derived NKT, monocyte, or macrophage.

[0086] In some embodiments, the cell is a stem cell or any cell type capable of being reprogrammed to an induced pluripotent stem cell (iPSC).

[0087] In some embodiments, the stem cell is differentiated after it is modified.

[0088] In some embodiments, the stem cell is differentiated into any one of a lymphocyte, a T cell, a T regulatory cell, a B cell, a natural killer (NK) cell, innate-like T cell (iT), natural killer T cells (NKT), γ δ T cell, invariant NKT cells (iNKT), monocyte, or macrophage.

[0089] According to embodiments of the present invention, there is provided a medicament comprising any one of the compositions described herein for use in inactivating a TRAC allele in a cell, wherein the medicament is administered by delivering to the cell the composition.

[0090] According to embodiments of the present invention, there is provided a use of any one of the compositions or modified cells described herein for treating, ameliorating, or preventing graft-versus-host-disease (GVHD), comprising delivering the composition or the modified cell to a subject experiencing or at risk of experiencing graft-versus-host-disease (GVHD).

[0091] According to embodiments of the present invention, there is provided a medicament comprising any one of the compositions or modified cells described herein for use in treating, ameliorating, or preventing graft-versus-host-disease (GVHD), wherein the medicament is administered by delivering the composition or the modified cell to a subject experiencing or at risk of experiencing graft-versus-host-disease (GVHD).

[0092] According to embodiments of the present invention, there is provided a kit for inactivating a TRAC allele in a cell, comprising any one of the compositions described herein and instructions for delivering the composition to the cell.

[0093] In some embodiments, wherein the composition is delivered to the cell ex vivo.

[0094] According to embodiments of the present invention, there is provided a kit for treating or preventing graft-versus-host-disease (GVHD) in a subject, comprising any one of the compositions or modified cells described herein and instructions for delivering the composition to a subject experiencing or at risk of experiencing graft-versus-host-disease (GVHD).

[0095] According to embodiments of the present invention, the modified immune cells (e.g., T cells) obtained by the described methods are intended to be used as a medicament for treating a cancer, infection, or immune disease in a subject in need thereof. The administration of the modified immune cell or a population thereof to a subject may be carried out in any convenient manner known in the art, including, but not limited to, aerosol inhalation, injection, ingestion, transfusion, implantation or transplantation. Injection or transfusion may be performed subcutaneously, intradermaliy, intratumorally, intranodally, intramedullary, intramuscularly, by intravenous or intralymphatic injection, or intraperitoneally. According to embodiments of the present invention, there is provided a method for adoptive cell therapy or prophylaxis comprising administering the modified cells to a subject suffering from or determined to be at risk of suffering from a cancer or an infection.

[0096] According to embodiments of the present invention, there is provided use of any one of the compositions or modified cells described herein for treating, ameliorating, or preventing graft-versus-host-disease (GVHD), comprising delivering the composition or modified cell to a subject experiencing or at risk of experiencing graft-versus-host-disease (GVHD).

[0097] According to embodiments of the present invention, there is provided a medicament comprising any one of the modified cells described herein for treating, ameliorating, or preventing graft-versus-host-disease (GVHD), such that the medicament is administered by delivering the composition to a subject experiencing or at risk of experiencing graft-versus-host-disease (GVHD).

[0098] According to embodiments of the present invention, there is provided an RNA molecule for use in modifying a cell (e.g. lymphocyte, T-cell, CAR-T cell) to treat, ameliorate, or prevent graft-versus-host-disease (GVHD) in a subject. The RNA molecule may be delivered to the cell ex vivo, in vitro, or in vivo.

[0099] According to embodiments of the present invention, there is provided a kit for inactivating a TRAC allele in a cell, comprising any one of the compositions described herein and instructions for delivering the composition to the cell.

[0100] According to embodiments of the present invention, there is provided a kit for treating or preventing graft-versus-host-disease (GVHD) in a subject, comprising any one of the compositions or modified cells described herein and instructions for delivering the composition or modified cell to a subject experiencing or at risk of experiencing graft-versus-host-disease (GVHD).

[0101] According to embodiments of the present invention, there is provided a cell modified by the method described herein or modified using the compositions described herein.

[0102] According to embodiments of the present invention, there is provided a gene editing composition comprising an RNA molecule comprising a guide sequence portion having 17-50 contiguous nucleotides containing nucleotides in the sequence set forth in any one of SEQ ID NOs: 1-1932. In some embodiments, the RNA molecule further comprises a portion having a sequence which binds to a CRISPR nuclease. In some embodiments, the sequence which binds to a CRISPR nuclease is a tracrRNA sequence.

[0103] In some embodiments, the RNA molecule further comprises a portion having a tracr mate sequence.

[0104] In some embodiments, the RNA molecule may further comprise one or more linker portions.

[0105] According to embodiments of the present invention, an RNA molecule may be up to 1000, 900, 800, 700, 600, 500, 450, 400, 350, 300, 290, 280, 270, 260, 250, 240, 230, 220, 210, 200, 190, 180, 170, 160, 150, 140, 130, 120, 110, or 100 nucleotides in length. Each possibility represents a separate embodiment. In embodiments of the present invention, the RNA molecule may be 17 up to 300 nucleotides in length, 100 up to 300 nucleotides in length, 150 up to 300 nucleotides in length, 100 up to 500 nucleotides in length, 100 up to 400 nucleotides in length, 200 up to 300 nucleotides in length, 100 to 200 nucleotides in length, or 150 up to 250 nucleotides in length. Each possibility represents a separate embodiment.

[0106] According to some embodiments of the present invention, the composition further comprises a tracrRNA molecule.

[0107] According to some embodiments of the present invention, there is provided a method for inactivating TRAC expression in a cell, the method comprising delivering to the cell a composition comprising an RNA molecule comprising a guide sequence portion having 17-50 contiguous nucleotides containing nucleotides in the sequence set forth in any one of SEQ ID NOs: 1-1932 and a CRISPR nuclease.

[0108] According to some embodiments of the present invention, there is provided a method for preventing graft-versus-host-disease (GVHD), the method comprising delivering to a cell of a subject a composition comprising an RNA molecule comprising a guide sequence portion having 17-50 contiguous nucleotides containing nucleotides in the sequence set forth in any one of SEQ ID NOs: 1-1932 and a CRISPR nuclease.

[0109] According to embodiments of the present invention, at least one CRISPR nuclease and the RNA molecule or RNA molecules are delivered to the subject and/or cells substantially at the same time or at different times.

[0110] In some embodiments, a tracrRNA molecule is delivered to the subject and/or cells substantially at the same time or at different times as the CRISPR nuclease and RNA molecule or RNA molecules.

[0111] The compositions and methods of the present disclosure may be utilized for treating, preventing, ameliorating, or slowing progression of graft-versus-host-disease (GVHD).

[0112] Any one of, or combination of, the above-mentioned strategies for deactivating TRAC expression may be used in the context of the invention.

[0113] In embodiments of the present invention, an RNA molecule is used to direct a CRISPR nuclease to an exon or a splice site of a TRAC allele in order to create a double-stranded break (DSB), leading to insertion or deletion of nucleotides by inducing an error-prone non-homologous end-joining (NHEJ) mechanism and formation of a frameshift mutation in the TRAC allele. The frameshift mutation may result in, for example, inactivation or knockout of the TRAC allele by generation of an early stop codon in the TRAC allele and to generation of a truncated protein or to nonsense-mediated mRNA decay of the transcript of the allele. In further embodiments, one RNA molecule is used to direct a CRISPR nuclease to a promotor of a TRAC allele.

[0114] In some embodiments, the method is utilized for treating a subject at risk for graft-versus-host-disease (GVHD), which are disease phenotypes resulting from expression of the TRAC gene. In such embodiments, the method results in improvement, amelioration, or prevention of the disease phenotype.

[0115] Embodiments of compositions described herein include at least one CRISPR nuclease, RNA molecule(s), and a tracrRNA molecule, being effective in a subject or cells at the same time. The at least one CRISPR nuclease, RNA molecule(s), and tracrRNA may be delivered substantially at the same time or can be delivered at different times but have effect at the same time. For example, this includes delivering the CRISPR nuclease to the subject or cells before the RNA molecule and/or tracrRNA is substantially extant in the subject or cells.

[0116] In some embodiments, the cell is a lymphocyte. In some embodiments, the cell is a T cell. In some embodiments, the cell is a T regulatory cell. In some embodiments, the cell is a stem cell. In some embodiments, the cell is an induced pluripotent stem cell (iPSC). In some embodiments, the cell is a fibroblast, blood cell, hepatocyte, keratinocyte, or any other cell type capable of being reprogrammed to an induced pluripotent stem cell (iPSC).

### TRAC Editing Strategies

[0117] The present invention provides methods to knockout TRAC alleles in cells of a subject, thereby avoiding graft-versus-host-disease (GVHD) upon adoptive transfer of the cells or cells derived therefrom to a subject in need of the adoptive transfer. The provided methods to knockout TRAC alleles in a cell may be used to treat, prevent, or ameliorate graft-versus-host-disease (GVHD).

[0118] TRAC editing strategies include, but are not limited to, biallelic knockout by targeting any one of, or a combination of, Exons 1-3, including within seven nucleotides upstream and downstream of the exons to flank splice donor and acceptor sites, as frameshifts in these exons lead to non-functional, truncated TRAC proteins or non-sense mediated decay of the mutated TRAC transcripts.

### CRISPR Nucleases and PAM Recognition

[0119] In some embodiments, the sequence specific nuclease is selected from CRISPR nucleases, or is a functional variant thereof. In some embodiments, the sequence specific nuclease is an RNA guided DNA nuclease. In such embodiments, the RNA sequence which guides the RNA guided DNA nuclease (e.g., Cpfl) binds to and/or directs the RNA guided DNA nuclease to all TRAC alleles in a cell. In some embodiments, the CRISPR complex does not further comprise a tracrRNA. A skilled artisan will appreciate that RNA molecules can be engineered to bind to a target of choice in a genome by commonly known methods in the art.

[0120] The term “PAM” as used herein refers to a nucleotide sequence of a target DNA located in proximity to the targeted DNA sequence and recognized by the CRISPR nuclease complex. The PAM sequence may differ depending on the nuclease identity. In addition, there are CRISPR nucleases that can target almost all PAMs. In some embodiments of the present invention. a CRISPR system utilizes one or more RNA molecules having a guide sequence portion to direct a CRISPR nuclease to a target DNA site via Watson-Crick base-pairing between the guide sequence portion and the protospacer on the target DNA site, which is next to the protospacer adjacent motif (PAM), which is an additional requirement for target recognition. The CRISPR nuclease then mediates cleavage of the target DNA site to create a double-stranded break within the protospacer. In a non-limiting example, a type II CRISPR system utilizes a mature crRNA:tracrRNA complex that directs the CRISPR nuclease, e.g. Cas9 to the target DNA the target DNA via Watson-Crick base-pairing between the guide sequence portion of the crRNA and the protospacer on the target DNA next to the protospacer adjacent motif (PAM). A skilled artisan will appreciate that each of the engineered RNA molecule of the present invention is further designed such as to associate with a target genomic DNA sequence of interest next to a protospacer adjacent motif (PAM), e.g., a PAM matching the sequence relevant for the type of CRISPR nuclease utilized, such as for a non-limiting example. NGG or NAG, wherein “N” is any nucleobase, for Streptococcus pyogenes Cas9 WT (SpCAS9); NNGRRT for Staphylococcus aureus (SaCas9); NNNVRYM for Jejuni Cas9 WT; NGAN or NGNG for SpCas9-VQR variant; NGCG for SpCas9-VRER variant; NGAG for SpCas9-EQR variant: NRRH for SpCas9-NRRH variant, wherein N is any nucleobase. R is A or G and H is A, C, or T; NRTH for SpCas9-NRTH variant, wherein N is any nucleobase, R is A or G and H is A, C, or T; NRCH for SpCas9-NRCH variant, wherein N is any nucleobase, R is A or G and H is A, C, or T; NG for SpG variant of SpCas9 wherein N is any nucleobase; NG or NA for SpCas9-NG variant of SpCas9 wherein N is any nucleobase; NR or NRN or NYN for SpRY variant of SpCas9, wherein N is any nucleobase, R is A or G and Y is C or T; NNG for Streptococcus canis Cas9 variant (ScCas9), wherein N is any nucleobase; NNNRRT for SaKKH-Cas9 variant of Staphylococcus aureus (SaCas9), wherein N is any nucleobase, and R is A or G: NNNNGATT for Neisseria meningitidis (NmCas9), wherein N is any nucleobase; TTN for Alicyclobacillus acidiphilus Cas12b (AacCas12b), wherein N is any nucleobase; or TTTV for Cpfl, wherein V is A, C or G. RNA molecules of the present invention are each designed to form complexes in conjunction with one or more different CRISPR nucleases and designed to target polynucleotide sequences of interest utilizing one or more different PAM sequences respective to the CRISPR nuclease utilized.

[0121] In some embodiments, an RNA-guided DNA nuclease e.g., a CRISPR nuclease, may be used to cause a DNA break, either double or single-stranded in nature, at a desired location in the genome of a cell. The most commonly used RNA-guided DNA nucleases are derived from CRISPR systems, however, other RNA-guided DNA nucleases are also contemplated for use in the genome editing compositions and methods described herein. For instance, see U.S. Patent Publication No. 2015/0211023, incorporated herein by reference.

[0122] CRISPR systems that may be used in the practice of the invention vary greatly. CRISPR systems can be a type I, a type II, or a type III system. Non-limiting examples of suitable CRISPR proteins include Cas3, Cas4, Cas5, Cas5e (or CasD), Cas6, Cas6e, Cas6f, Cas7, Cas8a1, Cas8a2, Cas8b, Cas8c, Cas9, Casl0, Casl Od, CasF, CasG, CasH, Csy1, Csy2, Csy3, Cse1 (or CasA), Cse2 (or CasB), Cse3 (or CasE), Cse4 (or CasC), Csc1, Csc2, Csa5, Csn2, Csm2, Csm3, Csm4, Csm5, Csm6, Cmr1, Cmr3, Cmr4, Cmr5, Cmr6, Csb1, Csb2, Csb3, Csxl7, Csxl4, Csxl0, Csxl6, CsaX, Csx3, Cszl, Csxl5, Csfl, Csf2, Csf3, Csf4, and Cul966.

[0123] In some embodiments, the RNA-guided DNA nuclease is a CRISPR nuclease derived from a type II CRISPR system (e.g., Cas9). The CRISPR nuclease may be derived from Streptococcus pyogenes, Streptococcus thermophilus, Streptococcus sp., Staphylococcus aureus, Neisseria meningitidis,. Treponema denticola, Nocardiopsis dassonvillei, Streptomyces pristinaespiralis, Streptomyces viridochromogenes, Streptomyces viridochromogenes, Streptosporangium roseum, Streptosporangium roseum, Alicyclobacillus acidocaldarius, Bacillus pseudomycoides, Bacillus selenitireducens, Exiguobacterium sibiricum, Lactobacillus delbrueckii, Lactobacillus salivarius, Microscilla marina, Burkholderiales bacterium, Polaromonas naphthalenivorans, Polaromonas sp., Crocosphaera watsonii. Cyanothece sp., Microcystis aeruginosa, Synechococcus sp., Acetohalobium arabaticum, Ammonifex degensii, Caldicelulosiruptor becscii, Candidatus Desulforudis, Clostridium botulinum, Clostridium difficile, Finegoldia magna, Natranaerobius thermophilus, Pelotomaculumthermopropionicum, Acidithiobacillus caldus, Acidithiobacillus ferrooxidans, Allochromatium vinosum, Marinobacter sp., Nitrosococcus halophilus, Nitrosococcus watsoni, Pseudoalteromonas haloplanktis, Ktedonobacter racemifer, Methanohalobium evestigatum, Anabaena variabilis, Nodularia spumigena, Nostoc sp., Arthrospira maxima, Arthrospira platensis, Arthrospira sp., Lyngbya sp., Microcoleus chthonoplastes, Oscillatoria sp., Petrotoga mobilis, Thermosipho africanus, Acaryochloris marina, or any species which encodes a CRISPR nuclease with a known PAM sequence. CRISPR nucleases encoded by uncultured bacteria may also be used in the context of the invention. (See Burstein et al. Nature, 2017). Variants of CRIPSR proteins having known PAM sequences e.g., SpCas9 D1135E variant, SpCas9 VQR variant, SpCas9 EQR variant, or SpCas9 VRER variant may also be used in the context of the invention.

[0124] Thus, an RNA guided DNA nuclease of a CRISPR system, such as a Cas9 protein or modified Cas9 or homolog or ortholog of Cas9, or other RNA guided DNA nucleases belonging to other types of CRISPR systems, such as Cpfl and its homologs and orthologs, may be used in the compositions of the present invention. Additional CRISPR nucleases may also be used, for example, the nucleases described in PCT International Application Publication Nos. WO2020/223514 and WO2020/223553, which are hereby incorporated by reference.

[0125] In certain embodiments, the CRIPSR nuclease may be a “functional derivative” of a naturally occurring Cas protein. A “functional derivative” of a native sequence polypeptide is a compound having a qualitative biological property in common with a native sequence polypeptide. “Functional derivatives” include, but are not limited to, fragments of a native sequence and derivatives of a native sequence polypeptide and its fragments, provided that they have a biological activity in common with a corresponding native sequence polypeptide. A biological activity contemplated herein is the ability of the functional derivative to hydrolyze a DNA substrate into fragments. The term “derivative” encompasses both amino acid sequence variants of polypeptide, covalent modifications, and fusions thereof. Suitable derivatives of a Cas polypeptide or a fragment thereof include but are not limited to mutants, fusions, covalent modifications of Cas protein or a fragment thereof. Derivatives include, but are not limited to, CRISPR nickases, catalytically inactive or “dead” CRISPR nucleases, and fusion of a CRISPR nuclease or derivative thereof to other enzymes such as base editors or retrotransposons. See for example, Anzalone et al. (2019) and PCT International Application No. PCT/US2020/037560.

[0126] Cas protein, which includes Cas protein or a fragment thereof, as well as derivatives of Cas protein or a fragment thereof, may be obtainable from a cell or synthesized chemically or by a combination of these two procedures. The cell may be a cell that naturally produces Cas protein, or a cell that naturally produces Cas protein and is genetically engineered to produce the endogenous Cas protein at a higher expression level or to produce a Cas protein from an exogenously introduced nucleic acid, which nucleic acid encodes a Cas that is same or different from the endogenous Cas. In some cases, the cell does not naturally produce Cas protein and is genetically engineered to produce a Cas protein.

[0127] In some embodiments, the CRISPR nuclease is Cpfl. Cpfl is a single RNA-guided endonuclease which utilizes a T-rich protospacer-adjacent motif. Cpfl cleaves DNA via a staggered DNA double-stranded break. Two Cpfl enzymes from Acidaminococcus and Lachnospiraceae have been shown to carry out efficient genome-editing activity in human cells. (See Zetsche et al., 2015).

[0128] Thus, an RNA guided DNA nuclease of a Type II CRISPR System, such as a Cas9 protein or modified Cas9 or homologs, orthologues, or variants of Cas9, or other RNA guided DNA nucleases belonging to other types of CRISPR systems, such as Cpfl and its homologs, orthologues, or variants, may be used in the present invention.

[0129] In some embodiments, the guide molecule comprises one or more chemical modifications which imparts a new or improved property (e.g., improved stability from degradation, improved hybridization energetics, or improved binding properties with an RNA guided DNA nuclease). Suitable chemical modifications include, but are not limited to: modified bases, modified sugar moieties, or modified inter-nucleoside linkages. Non-limiting examples of suitable chemical modifications include: 4-acetylcytidine, 5-(carboxyhydroxymethyl)uridine, 2′-O-methylcytidine, 5-carboxymethylaminomethyl-2-thiouridine, 5-carboxymethylaminomethyluridine, dihydrouridine, 2′-O-methylpseudouridine, “beta, D-galactosylqueuosine”, 2′-O-methylguanosine, inosine, N6-isopentenyladenosine. 1-methyladenosine, I-methylpseudouridine. 1-methylguanosine, 1-methylinosine. “2,2-dimethylguanosine”, 2-methyladenosine, 2-methylguanosine, 3-methylcytidine, 5-methylcytidine, N6-methyladenosine, 7-methylguanosine, 5-methylaminomethyluridine, 5-methoxyaminomethyl-2-thiouridine, “beta, D-mannosylqueuosine”, 5-methoxycarbonylmethyl-2-thiouridine, 5-methoxycarbonylmethyluridine, 5-methoxyuridine, 2-methylthio-N6-isopentenyladenosine, N-((9-beta-D-ribofuranosyl-2-methylthiopurine-6-yl)carbamoyl)threonine, N-((9-beta-D-ribofuranosylpurine-6-yl)N-methylcarbamoyl)threonine, uridine-5-oxyacetic acid-methylester, uridine-5-oxyacetic acid, wybutoxosine, queuosine, 2-thiocytidine, 5-methyl-2-thiouridine, 2-thiouridine, 4-thiouridine, 5-methyluridine, N-((9-beta-D-ribofuranosylpurine-6-yl)-carbamoyl)threonine, 2′-O)-methyl-5-methyluridine, 2′-O-methyluridine, wybutosine, “3-(3-amino-3-carboxy-propyl)uridine, (acp3)u”, 2′-0-methyl (M), 3′-phosphorothioate (MS), 3′-thioPACE (MSP), pseudouridine, or 1-methyl pseudo-uridine. Each possibility represents a separate embodiment of the present invention.

[0130] In addition to targeting TRAC alleles by a RNA-guided CRISPR nuclease, other means of inhibiting TRAC expression in a target cell include but are not limited to use of a gapmer, shRNA, siRNA, a customized TALEN, meganuclease, or zinc finger nuclease, a small molecule inhibitor, and any other method known in the art for reducing or eliminating expression of a gene in a target cell. See, for example, U.S. Pat. Nos. 6,506,559; 7,560,438; 8,420,391; 8,552,171; 7,056,704; 7,078,196; 8,362,231; 8,372,968; 9,045,754; and PCT International Publication Nos. WO/2004/067736; WO/2006/097853; WO/2003/087341; WO/2000/0415661; WO/2003/080809; WO/2010/079430; WO/2010/079430; WO/2011/072246; WO/2018/057989; and WO/2017/164230, the entire contents of each of which are incorporated herein by reference.

[0131] Advantageously, the guide RNA molecules presented herein provide improved TRAC knockout efficiency when complexed with a CRISPR nuclease in a cell relative to other guide RNA molecules. These specifically designed sequences may also be useful for identifying TRAC target sites for other nucleotide targeting-based gene-editing or gene-silencing methods, for example, siRNA, TALENs, meganucleases or zinc-finger nucleases.

### Delivery to Cells

[0132] Any one of the compositions described herein may be delivered to a target cell by any suitable means. RNA molecule compositions of the present invention may be targeted to any cell which contains and/or expresses a TRAC allele, such as a mammalian lymphocyte or stem cell. For example, in one embodiment the RNA molecule specifically targets TRAC alleles in a target cell and the target cell is a lymphocyte, a T cell, a T regulatory cell, a B cell, a natural killer (NK) cell, a macrophage, a stem cell, or a fibroblast, blood cell, hepatocyte, keratinocyte, or any other cell type capable of being reprogrammed to an induced pluripotent stem cell (iPSC). The delivery to the cell may be performed in vivo, ex vivo, or in vitro. Further, the nucleic acid compositions described herein may be delivered to a cell as one or more of DNA molecules, RNA molecules, ribonucleoproteins (RNP), nucleic acid vectors, or any combination thereof.

[0133] In some embodiments, the RNA molecule comprises a chemical modification. Non-limiting examples of suitable chemical modifications include 2′-0-methyl (M), 2′-0-methyl, 3′phosphorothroate (MS) or 2′-0-methyl, 3 ‘thioPACE (MSP), pseudouridine, and 1-methyl pseudo-uridine. Each possibility represents a separate embodiment of the present invention.

[0134] Any suitable viral vector system may be used to deliver nucleic acid compositions e.g., the RNA molecule compositions of the subject invention. Conventional viral and non-viral based gene transfer methods can be used to introduce nucleic acids and target tissues. In certain embodiments, nucleic acids are administered for in vivo or ex vivo gene therapy uses. Non-viral vector delivery systems include naked nucleic acid, and nucleic acid complexed with a delivery vehicle such as a liposome or poloxamer. For a review of gene therapy procedures, see Anderson (1992): Nabel & Felgner (1993): Mitani & Caskey (1993): Dillon (1993); Miller (1992): Van Brunt (1988): Vigne (1995): Kremer & Perricaudet (1995): Haddada et al. (1995): and Yu et al. (1994).

[0135] Methods of non-viral delivery of nucleic acids and/or proteins include electroporation, lipofection, microinjection, biolistics, particle gun acceleration, virosomes, liposomes, immunoliposomes, lipid nanoparticles (LNPs), polycation or lipid:nucleic acid conjugates, artificial virions, and agent-enhanced uptake of nucleic acids or can be delivered to plant cells by bacteria or viruses (e.g., Agrobacterium, Rhizobium sp. NGR234, Sinorhizoboiummeliloti, Mesorhizobium loti, tobacco mosaic virus, potato virus X, cauliflower mosaic virus and cassava vein mosaic virus). (See, e.g., Chung et al., 2006). Sonoporation using, e.g., the Sonitron 2000 system (Rich-Mar), can also be used for delivery of nucleic acids. Cationic-lipid mediated delivery of proteins and/or nucleic acids is also contemplated as an in vivo. ex vivo, or in vitro delivery method. (See Zuris et al. (2015): see also Coelho et al. (2013): Judge et al. (2006); and Basha et al. (2011)).

[0136] Non-viral vectors, such as transposon-based systems e.g. recombinant Sleeping Beauty transposon systems or recombinant PiggyBac transposon systems, may also be delivered to a target cell and utilized for transposition of a polynucleotide sequence of a molecule of the composition or a polynucleotide sequence encoding a molecule of the composition in the target cell.

[0137] Additional exemplary nucleic acid delivery systems include those provided by Amaxa. RTM. Biosystems (Cologne, Germany), Maxcyte, Inc. (Rockville, Md.), BTX Molecular Delivery Systems (Holliston, Mass.) and Copernicus Therapeutics Inc., (see, e.g., U.S. Pat. No. 6,008,336). Lipofection is described in e.g., U.S. Pat. Nos. 5,049,386, 4,946,787; and 4,897,355, and lipofection reagents are sold commercially (e.g., Transfectam.TM., Lipofectin.TM. and Lipofectamine.TM. RNAiMAX). Cationic and neutral lipids that are suitable for efficient receptor-recognition lipofection of polynucleotides include those disclosed in PCT International Publication Nos. WO/1991/017424 and WO/1991/016024. Delivery can be to cells (ex vivo administration) or target tissues (in vivo administration).

[0138] The preparation of lipid:nucleic acid complexes, including targeted liposomes such as immunolipid complexes, is well known to one of skill in the art (see, e.g., Crystal, Science (1995): Blaese et al., (1995): Behr et al., (1994): Remy et al. (1994): Gao and Huang (1995): Ahmad and Allen (1992): U.S. Pat. Nos. 4,186,183: 4,217,344: 4,235,871: 4,261,975; 4,485,054: 4,501,728: 4,774,085: 4,837,028; and 4,946,787).

[0139] Additional methods of delivery include the use of packaging the nucleic acids to be delivered into EnGeneIC delivery vehicles (EDVs). These EDVs are specifically delivered to target tissues using bispecific antibodies where one arm of the antibody has specificity for the target tissue and the other has specificity for the EDV. The antibody brings the EDVs to the target cell surface and then the EDV is brought into the cell by endocytosis. Once in the cell, the contents are released (See MacDiarmid et al., 2009).

[0140] The use of RNA or DNA viral based systems for viral mediated delivery of nucleic acids take advantage of highly evolved processes for targeting a virus to specific cells in the body and trafficking the viral payload to the nucleus. Viral vectors can be administered directly to patients (in vivo) or they can be used to treat cells in vitro and the modified cells are administered to patients (ex vivo). Conventional viral based systems for the delivery of nucleic acids include, but are not limited to, retroviral, lentivirus, adenoviral, adeno-associated, vaccinia and herpes simplex virus vectors for gene transfer.

[0141] The tropism of a retrovirus can be altered by incorporating foreign envelope proteins, expanding the potential target population of target cells. Lentiviral vectors are retroviral vectors that are able to transduce or infect non-dividing cells and typically produce high viral titers. Selection of a retroviral gene transfer system depends on the target tissue. Retroviral vectors are comprised of cis-acting long terminal repeats with packaging capacity for up to 6-10 kb of foreign sequence. The minimum cis-acting LTRs are sufficient for replication and packaging of the vectors, which are then used to integrate the therapeutic gene into the target cell to provide permanent transgene expression. Widely used retroviral vectors include those based upon murine leukemia virus (MuLV), gibbon ape leukemia virus (GaLV), Simian Immunodeficiency virus (SIV), human immunodeficiency virus (HIV), and combinations thereof (See, e.g., Buchschacher et al. (1992): Johann et al. (1992): Sommerfelt et al. (1990): Wilson et al. (1989): Miller et al. (1991): PCT International Publication No. WO/1994/026877A1).

[0142] At least six viral vector approaches are currently available for gene transfer in clinical trials, which utilize approaches that involve complementation of defective vectors by genes inserted into helper cell lines to generate the transducing agent.

[0143] pLASN and MFG-S are examples of retroviral vectors that have been used in clinical trials (See Dunbar et al., 1995; Kohn et al., 1995; Malech et al., 1997). PA317/pLASN was the first therapeutic vector used in a gene therapy trial (Blaese et al., 1995). Transduction efficiencies of 50% or greater have been observed for MFG-S packaged vectors. (Ellem et al., (1997): Dranoff et al., 1997).

[0144] Packaging cells are used to form virus particles that are capable of infecting a host cell. Such cells include 293 cells, which package adenovirus, AAV, and Psi-2 cells or PA317 cells, which package retrovirus. Viral vectors used in gene therapy are usually generated by a producer cell line that packages a nucleic acid vector into a viral particle. The vectors typically contain the minimal viral sequences required for packaging and subsequent integration into a host (if applicable), other viral sequences being replaced by an expression cassette encoding the protein to be expressed. The missing viral functions are supplied in trans by the packaging cell line. For example, AAV vectors used in gene therapy typically only possess inverted terminal repeat (ITR) sequences from the AAV genome which are required for packaging and integration into the host genome. Viral DNA is packaged in a cell line, which contains a helper plasmid encoding the other AAV genes, namely rep and cap, but lacking ITR sequences. The cell line is also infected with adenovirus as a helper. The helper virus promotes replication of the AAV vector and expression of AAV genes from the helper plasmid. The helper plasmid is not packaged in significant amounts due to a lack of ITR sequences. Contamination with adenovirus can be reduced by, e.g., heat treatment to which adenovirus is more sensitive than AAV. Additionally, AAV can be produced at clinical scale using baculovirus systems (see U.S. Pat. No. 7,479,554).

[0145] In many gene therapy applications, it is desirable that the gene therapy vector be delivered with a high degree of specificity to a particular tissue type. Accordingly, a viral vector can be modified to have specificity for a given cell type by expressing a ligand as a fusion protein with a viral coat protein on the outer surface of the virus. The ligand is chosen to have affinity for a receptor known to be present on the cell type of interest. For example, Han et al. (1995) reported that Moloney murine leukemia virus can be modified to express human heregulin fused to gp70, and the recombinant virus infects certain human breast cancer cells expressing human epidermal growth factor receptor. This principle can be extended to other virus-target cell pairs, in which the target cell expresses a receptor and the virus expresses a fusion protein comprising a ligand for the cell-surface receptor. For example, filamentous phage can be engineered to display antibody fragments (e.g., FAB or Fv) having specific binding affinity for virtually any chosen cellular receptor. Although the above description applies primarily to viral vectors, the same principles can be applied to nonviral vectors. Such vectors can be engineered to contain specific uptake sequences which favor uptake by specific target cells.

[0146] Gene therapy vectors can be delivered in vivo by administration to an individual patient, for example by systemic administration (e.g., intravitreal, intravenous, intraperitoneal, intramuscular, subdermal, or intracranial infusion) or topical application.

[0147] Alternatively, vectors can be delivered to cells ex vivo, such as cells explanted from an individual patient (e.g., lymphocytes, bone marrow aspirates, tissue biopsy) or universal donor hematopoietic stem cells, followed by reimplantation of the cells into a patient, optionally after selection for cells which have incorporated the vector. A non-limiting exemplary ex vivo approach may involve removal of tissue (e.g., peripheral blood, bone marrow; and spleen) from a patient for culture, nucleic acid transfer to the cultured cells (e.g., hematopoietic stem cells), followed by grafting the cells to a target tissue (e.g., bone marrow, and spleen) of the patient. In some embodiments, the stem cell or hematopoietic stem cell may be further treated with a viability enhancer.

[0148] Ex vivo cell transfection for diagnostics, research, or for gene therapy (e.g., via re-infusion of the transfected cells into the host organism) is well known to those of skill in the art. In a preferred embodiment, cells are isolated from the subject organism, transfected with a nucleic acid composition, and re-infused back into the subject organism (e.g., patient). Various cell types suitable for ex vivo transfection are well known to those of skill in the art (See, e.g., Freshney, “Culture of Animal Cells, A Manual of Basic Technique and Specialized Applications (6th edition, 2010) and the references cited therein for a discussion of how to isolate and culture cells from patients).

[0149] Vectors (e.g., retroviruses, liposomes, etc.) containing therapeutic nucleic acid compositions can also be administered directly to an organism for transduction of cells in vivo. Administration is by any of the routes normally used for introducing a molecule into ultimate contact with blood or tissue cells including, but not limited to, injection, infusion, topical application (e.g., eye drops and cream) and electroporation. Suitable methods of administering such nucleic acids are available and well known to those of skill in the art, and, although more than one route can be used to administer a particular composition, a particular route can often provide a more immediate and more effective reaction than another route. According to some embodiments, the composition is delivered via IV injection.

[0150] Vectors suitable for introduction of transgenes into immune cells (e.g., T-cells) include non-integrating lentivirus vectors. See, e.g., U.S. Patent Publication No. 2009/0117617.

[0151] Pharmaceutically acceptable carriers are determined in part by the particular composition being administered, as well as by the particular method used to administer the composition. Accordingly, there is a wide variety of suitable formulations of pharmaceutical compositions available, as described below (See, e.g., Remington's Pharmaceutical Sciences, 17th ed., 1989).

### Examples of RNA Guide Sequences which Specifically Target Alleles of TRAC Gene

[0152] Although a large number of guide sequences can be designed to target the TRAC gene, the nucleotide sequences described in Table 1 and are identified by SEQ ID NOs: 1-1932 were specifically selected to effectively implement the methods set forth herein.

[0153] Table 1 shows guide sequences designed for use as described in the embodiments above to associate with target sequences of the TRAC gene. Each engineered guide molecule is further designed such as to associate with a target genomic DNA sequence of interest that lies next to a protospacer adjacent motif (PAM), e.g., a PAM matching the sequence NGG or NAG, where “N” is any nucleobase. The guide sequences were designed to work in conjunction with one or more different CRISPR nucleases, including, but not limited to, e.g. SpCas9WT (PAM SEQ: NGG), SpCas9.VQR.1 (PAM SEQ: NGAN), SpCas9.VQR.2 (PAM SEQ: NGNG), SpCas9.EQR (PAM SEQ: NGAG), SpCas9.VRER (PAM SEQ: NGCG), SaCas9WT (PAM SEQ: NNGRRT), SpRY (PAM SEQ: NRN or NYN), NmCas9WT (PAM SEQ: NNNNGATT), Cpfl (PAM SEQ: TTTV), or JeCas9WT (PAM SEQ: NNNVRYM). RNA molecules of the present invention are each designed to form complexes in conjunction with one or more different CRISPR nucleases and designed to target polynucleotide sequences of interest utilizing one or more different PAM sequences respective to the CRISPR nuclease utilized.

[0154] As used herein, the following nucleotide identifiers are used to represent a referenced nucleotide base(s):

| | |
|---|---|
| Nucleotide reference | Base(s) represented |

| | | | | |
|---|---|---|---|---|
| A | A | | | |
| C | | C | | |
| G | | | G | |
| T | | | | T |
| W | A | | | T |
| S | | C | G | |
| M | A | C | | |
| K | | | G | T |
| R | A | | G | |
| Y | | C | | T |
| B | | C | G | T |
| D | A | | G | T |
| H | A | C | | T |
| V | A | C | G | |
| N | A | C | G | T |

TABLE 1
Guide sequences designed to associate
with specific TRAC gene targets

| | SEQ ID | SEQ ID | SEQ ID |
|---|---|---|---|
| | NOs: of | NOs: of | NOs: of |
| | 20 base | 21 base | 22 base |
| Target | guides | guides | guides |
| 14:22547499-14:22547785 | 1-398 | 399-827 | 828-1286 |
| Exon 1, including the ATG start | | | |
| codon to 7nt DS of Exon 1 | | | |
| 14:22549631-14:22549689 | 1287-1333 | 1334-1384 | 1385-1437 |
| Exon 2, including 7nt US and | | | |
| 7nt DS to Exon 2 | | | |
| 14:22550550-14:22550671 | 1438-1586 | 1587-1747 | 1748-1911 |
| Exon 3, including 7nt US of | | | |
| Exon 3 to the stop codon | | | |

The indicated locations listed in column 1 of the Table 1 are based on gnomAD v3 database and UCSC Genome Browser assembly ID: hg38, Sequencing/Assembly provider ID: Genome Reference Consortium Human GRCh38.p12 (GCA_000001405.27). Assembly date: December 2013 initial release; December 2017 patch release 12.

[0155] Examples are provided below to facilitate a more complete understanding of the invention. The following examples illustrate the exemplary modes of making and practicing the invention. However, the scope of the invention is not limited to specific embodiments disclosed in these Examples, which are for purposes of illustration only.

### EXPERIMENTAL DETAILS

### Example 1: TRAC Modification Anaylsis

[0156] Guide sequences comprising 17-50 contiguous nucleotides containing nucleotides in the sequence set forth in any one of SEQ ID NOs: 1-1932 are screened for high on target activity using SpCas9 in T cells. On target activity is determined by DNA capillary electrophoresis analysis.

[0157] Additional examples demonstrating the editing ability of TRAC specific RNA guides are described below and may also be found in PCT International Publication No. WO 2020/223514 A2, the contents of which are hereby incorporated by reference.

### Example 2: OMNI-50 CRISPR Nuclease RNP Activity Using TRAC guides

[0158] TRAC editing by an OMNI-50 nuclease was observed in primary T cells, as can be seen in Table 2. 64% (22/34) of the tested TRAC guides were found to be active and had editing levels ranging between 5% to 84%.

[0159] 19 TRAC guides displayed high editing. Considering the potential further optimization, full knock-out TRAC by OMNI-50 is possible with the appropriate strategy.

TABLE 2
OMNI-50 Activity as an RNP

| | Genomic | Corresponding | | % |
|---|---|---|---|---|
| System | site | spacer name | Spacer sequence | indels |
| Primary T | TRAC | gRNA 1 | UCUCUCAGCUGGUACACGGCA | 18% |
| cells | | | (SEQ ID NO: 1912) | |
| | | gRNA 2 | GCGUCAUGAGCAGAUUAAACC | 81% |
| | | | (SEQ ID NO: 1690) | |
| | | gRNA 3 | UCUCGACCAGCUUGACAUCAC | 10% |
| | | | (SEQ ID NO: 1913) | |
| | | gRNA 4 | UUAAACCCGGCCACUUUCAGG | 46% |
| | | | (SEQ ID NO: 1914) | |
| | | gRNA 5 | CUGUGCUAGACAUGAGGUCUA | 26% |
| | | | (SEQ ID NO: 608) | |
| | | gRNA 8 | ACUUCAAGAGCAACAGUGCUG | 3% |
| | | | (SEQ ID NO: 459) | |
| | | gRNA 9 | AAGAGCAACAGUGCUGUGGCC | 13% |
| | | | (SEQ ID NO: 1915) | |
| | | gRNA 10 | GCUGGGGAAGAAGGUGUCUUC | 7% |
| | | | (SEQ ID NO: 1916) | |
| | | gRNA 15 | AUAGGCAGACAGACUUGUCAC | 16% |
| | | | (SEQ ID NO: 499) | |
| | | gRNA 17 | UAGAGUCUCUCAGCUGGUACA | 23% |
| | | | (SEQ ID NO: 724) | |
| | | gRNA 18 | GUCUCUCAGCUGGUACACGGC | 5% |
| | | | (SEQ ID NO: 696) | |
| | | gRNA 19 | CAGCUGGUACACGGCAGGGUC | 11% |
| | | | (SEQ ID NO: 1917) | |
| | | gRNA 20 | AGCUGGUACACGGCAGGGUCA | 13% |
| | | | (SEQ ID NO: 482) | |
| | | gRNA 21 | UACACGGCAGGGUCAGGGUUC | 19% |
| | | | (SEQ ID NO: 719) | |
| | | gRNA 23 | CUUUCAAAACCUGUCAGUGAU | 4% |
| | | | (SEQ ID NO: 1673) | |
| | | gRNA 25 | UCCGAAUCCUCCUCCUGAAAG | 21% |
| | | | (SEQ ID NO: 1723) | |
| | | gRNA 26 | AAUCCUCCUCCUGAAAGUGGC | 11% |
| | | | (SEQ ID NO: 1596) | |
| | | gRNA 27 | AUCCUCCUCCUGAAAGUGGCC | 9% |
| | | | (SEQ ID NO: 1620) | |
| | | gRNA 29 | CUGCUCAUGACGCUGCGGCUG | 15% |
| | | | (SEQ ID NO: 1671) | |
| | | gRNA 30 | AGAUUAAACCCGGCCACUUUC | 24% |
| | | | (SEQ ID NO: 1918) | |
| | | gRNA 31 | AACCCGGCCACUUUCAGGAGG | 29% |
| | | | (SEQ ID NO: 1590) | |
| | | gRNA 32 | GCCACUUUCAGGAGGAGGAUU | 29% |
| | | | (SEQ ID NO: 1919) | |

OMNI-50 activity as RNP: OMNI-50 RNP was assembled with synthetic sgRNA (Agilent) and electroporated into cells. Several cell types were tested with a variety of sgRNAs. Cellular system, gene name, and spacer sequences are indicated next to the editing level as measured by NGS.

### Example 3: Multiplexing TRAC and B2M Editing

[0160] TRAC and B2M genes may be knocked out simultaneously by using a multiplexing approach. TRAC and B2M multiplex editing was tested by mixing two RNP populations and electroporating the mix into primary T cells. gRNA 32 was used for TRAC targeting and gRNA 15 was used for B2M targeting (spacer sequences are listed in Table 3). At 72 h cells were harvested and tested for editing by NGS. The TRAC gene measured 50% editing, and the B2M gene measured 25% editing. These results were similar to editing levels with a single RNP that was performed side-by-side to the multiplex test (Table 3).

TABLE 3
OMNI-50 Multiplexing

| | | | OMNI-50 Editing | | OMNI-50 STD | |
|---|---|---|---|---|---|---|
| Gene | Site | Spacer Sequence | Donor 1 | Donor 2 | Donor 1 | Donor 2 |
| TRAC | gRNA 32 | GCCACUUUCAG | 59.00 | 53.00 | 9.00 | 10.00 |
| | | GAGGAGGAUU | | | | |
| | | (SEQ ID NO: 1919) | | | | |
| B2M | gRNA 15 | UCACAGCCCAA | 42.00 | 44.00 | 13.00 | 19.00 |
| | | GAUAGUUAAG | | | | |
| | | (SEQ ID NO: 1938) | | | | |
| TRAC + | gRNA 32 + | Test for TRAC | 55.00 | 44.00 | 5.00 | 1.00 |
| B2M | gRNA 15 | | | | | |
| TRAC + | gRNA 32 + | Test for B2M | 22.00 | 27.00 | 3.00 | 1.00 |
| B2M | gRNA 15 | | | | | |

[0161] Table 3. OMNI-50 multiplexing in primary T cells: Multiplexing of OMNI-50 was performed by electroporation into activated primary T cells, targeting either TRAC or B2M genes, or combined targeting. The first two rows show each gene separately on two donors that were randomly chosen from a five-donor bank. The final two rows show the same analysis for each gene when electroporation was performed as a multiplex. Editing activity was determined by indel count after amplicon based NGS. Standard deviation of duplicates is also shown. Using only TRAC gRNA had no effect on the B2M gene and vice versa (not shown).

### Example 4: Evaluating Off-Targets Using a Guide-Seq Unbiased Analysis Method

[0162] To further evaluate the specificity of TRAC guides, the number of off-targets were tested across several sites using guide-seq as shown in Table 4 below.

TABLE 4
TRAC g32 off-targets

| | TRAC g32 Guide |
|---|---|
| SpCas9 #1 | 10 |
| SpCas9 #2 | 9 |
| OMNI-50 #1 | 5 |
| OMNI-50 #2 | 5 |
| SpCas9 on target editing | 93%, 81% |
| SpCas9 ODN integration | 14% |
| OMNI-50 on target editing | 51%, 74% |
| OMNI-50 ODN integration | 31%, 26% |

[0163] Table 4. TRAC off-target analysis by unbiased biochemical assay (guide seq): Off-target site counts of SpCas9 or OMNI-50 nucleases is shown in two replicates for the TRAC g32 guide. For this analysis, only amplified sites with ≥10 reads were analyzed, and sites with a lower number of reads were discarded in order to reduce background noise. The editing level at the on-target site determined by indel count after amplicon based NGS is also indicated, as well as ODN integration.

TABLE 5
Percent editing of various OMNI CRISPR Nucleases and TRAC-targeting spacers

| | Full Spacer | Spacer | Spacer | | | |
|---|---|---|---|---|---|---|
| Nuclease | Name | name | Sequence | PAM | Average | STD |
| OMNI-75 | OMN-175 site | S12 | SEQ ID | TCGGAA | 12.39 | 0.94 |
| | 12 | | NO: 1920 | | | |
| | OMNI-75 site | S13 | SEQ ID | GAGAGA | 12.12 | 1.13 |
| | 13 | | NO: 1921 | | | |
| OMNI-79 | OMNI-79 site | S21 | SEQ ID | CGGAAC | 44.4618344 | 3.99 |
| | 21 | | NO: 1922 | | | |
| | OMNI-79 site | S24 | SEQ ID | TGGACT | 2.80623815 | 0.29 |
| | 24 | | NO: 895 | | | |
| OMNI-91 | OMNI-91 site | S27 | SEQ ID | CAGGGTCA | 15.1033333 | 1.26666228 |
| | 27 | | NO: 1923 | | | |
| | OMNI-91 site | S28 | SEQ ID | CAGCGTCA | 51.9733333 | 2.71000615 |
| | 28 | | NO: 1793 | | | |
| OMNI-93 | OMNI-93 site | S27 | SEQ ID | CAGGGTCA | 41.1766667 | 1.42141948 |
| | 27 | | NO: 1923 | | | |
| OMNI-103 | OMNI-103 | S35 | SEQ ID | GAGACTCT | 79.8466667 | 2.33872472 |
| | S35 | | NO: 1080 | | | |
| | OMNI-103 | S36 | SEQ ID | CAGACTTG | 76.9666667 | 4.69017413 |
| | S36 | | NO: 1182 | | | |
| OMNI-120 | OMNI-120 35 | S35 | SEQ ID | GAGACTCT | 41.32 | 3.45131859 |
| | | | NO: 1080 | | | |
| | OMNI-120 | S36 | SEQ ID | CAGACTTG | 28.5166667 | 2.03524773 |
| | S36 | | NO: 1182 | | | |
| OMNI-131 | OMNI-131 | S44 | SEQ ID | GGAACCCA | 24.4933333 | 0.86932924 |
| | S44 | | NO: 1852 | | | |
| | OMNI-131 | S56 | SEQ ID | TGTACCAG | 9.63 | 1.50821086 |
| | S56 | | NO: 1924 | | | |
| OMNI-132 | OMNI-132 | S11 | SEQ ID | CTAAAT | 27.2766667 | 3.96389119 |
| | S11 | | NO: 1110 | | | |
| | OMNI-132 | S49 | SEQ ID | CAAAATCG | 1.27333333 | 0.09291573 |
| | S49 | | NO: 1925 | | | |
| OMNI-138 | OMNI-138 | S59 | SEQ ID | TCCAGTGA | 79.5966667 | 3.36295009 |
| | S59 | | NO: 1138 | | | |

TABLE 6
PAM sequences of OMNI nucleases present in TRAC Exons 1-4

| | PAM | | | | |
|---|---|---|---|---|---|
| Nuclease | Sequence | Exon 1 | Exon 2 | Exon 3 | Exon 4 |
| OMNI-91 | NNGNRY | 25 | 1 | 10 | 40 |
| | NNGNGTNA | 2 | 0 | 1 | 0 |
| OMNI-93 | NNGGD | 41 | 7 | 23 | 59 |
| | NNGGG | 0 | 0 | 2 | 5 |
| OMNI-103 | NNRRHY | 11 | 2 | 6 | 13 |
| | NNRACT | 4 | 1 | 1 | 3 |
| OMNI-120 | NRRAC | 11 | 2 | 6 | 13 |
| OMNI-138 | NNNNGBNH | 44 | 9 | 15 | 68 |
| OMNI-131 | NNNRCC | 12 | 1 | 8 | 25 |
| | NRNRCC | 6 | 0 | 5 | 10 |
| OMNI-132 | NNRAND | 38 | 7 | 12 | 59 |
| | NNAANT | 9 | 2 | 3 | 10 |

### Example 5: Additional OMNI CRISPR Nuclease Activity Assays Using TRAC Specific Guides

[0164] T cell receptors (TCR) recognize foreign antigens which have been processed as small peptides and bound to major histocompatibility complex (MHC) molecules at the surface of antigen presenting cells (APC). Each T cell receptor is a dimer consisting of one alpha and one beta chain or one delta and one gamma chain. TRAC encodes for the alpha subunit of the TCR.

[0165] In Hela cells, the CRIPSR nucleases listed in Table 8 were screened by introducing a nuclease and guide RNA molecule (Table 9) to a cell. Briefly, a screen was performed in 96-well format with 64 ng nuclease co-transfected with each of the guides at 20 ng using JetOPTIMUS reagent (Polyplus). Cells were harvested 72 hours post DNA transfection. Cell lysis and genomic DNA extraction was performed using Quick Extract (Lucigen) and endogenous genomic regions were amplified using specific primers to measure editing activity by next-generation sequencing (NGS). The screen identified 36 active novel nucleases. Editing was observed in 50 sites along the TRAC gene (Table 7). The sites for editing were chosen according to the PAM requirements for each nuclease, which was obtained by in vitro TXTL assay.

[0166] OMNI-103 CRISPR nuclease was further screened in Hela cells for additional sites along the TRAC gene. To this end, the corresponding OMNI-P2A-mCherry expression vector (Table 10) was transfected into HeLa cells together with a sgRNA molecule designed to target specific location in the TRAC gene (gRNA or “spacer” sequences are listed in Table 9). At 72 h, cells were harvested, and half of the cells were used for quantification of transfection efficiency by FACS using mCherry fluorescence as marker. The other half of the cells were lysed, and their genomic DNA content was used in PCR reaction that amplified the corresponding putative genomic targets. Amplicons were subjected to NGS and the resulting sequences were then used to calculate the percentage of editing events in each target site. Short insertions or deletions (indels) around the cut site are the typical outcome of repair of DNA ends following nuclease induced DNA cleavage. The calculation of % editing was therefore deduced from the fraction of indel-containing sequences within each amplicon. Significant editing activity was observed in nine (9) sites along the TRAC gene (FIG. 2).

[0167] OMNI-93 and OMNI-103 were further developed for use as part of an RNP and tested in a U2OS cell line. Briefly, 2×10⁵ U2OS cells were mixed with preassembled RNPs composed of 105 pmole OMNI-93 or OMNI-103 protein and 120 pmole of a sgRNA comprising a 22-nucleotide guide sequence portion mixed with 100 pmole of electroporation enhancer (IDT-1075916). The mixture was electroporated into the cells using SE cell 4D-nucleofector X Kit S (V4XP-3032, Lonza) by applying the DN-100 program. OMNI-103 with no gRNA molecule served as a negative control. A fraction of the cells were harvested 72 hours post electroporation and genomic DNA was extracted to measure on-target activity by NGS. According to NGS analysis, all guides (FIG. 3) depicted indel activity ranging 90%-100%.

[0168] OMNI-103 was further tested as part of an RNP for TRAC editing in primary T cells using the same gRNA molecules showing editing activity in the U2OS cell system. Briefly, primary T cells were isolated from blood donations (Israel blood bank) using the buffy coat method for PBMC isolation, followed by negative isolation of CD3+ cells (T cell isolation kit, 130-096-535 Miltenyi). Primary T cells were then activated by CD3 and CD28 beads (T cell activation/expansion kit, 130-091-441 Miltenyi). 2×10⁵ primary T cells were mixed with preassembled RNPs composed of 113 pmole OMNI-103 protein and 160 pmole of a sgRNA having a 22-nucleotide guides sequence portion, and electroporated using P3 cell 4D-nucleofector X Kit S (V4XP-3032, Lonza) by applying the EH-115 program. A fraction of the cells were harvested 72 h post electroporation and TRAC surface expression was measured by flow cytometry (anti-TCR VioBlue, 1:50, #130-119-618 Miltenyi). According to FACS analysis, both guides S35 and S36 (FIG. 4) depicted editing activity ranging 50%-70%.

TABLE 7
OMNI CRISPR % Editing in HeLa Cells

| Gude Sequence | | | |
|---|---|---|---|
| Portion Name | Specific PAM | OMNI and PAM | % Editing |
| s12 | TCGGAA | OMNI-75 NNGNRA | 5.84 |
| s13 | GAGAGA | OMNI-75 NNGNRA | 10.54 |
| s24 | TGGACT | OMNI-79 NGG | 44.46 |
| s27 | CAGGGTCAGGGTTCTG | OMNI-91 NNGNGTNA | 15.10 |
| | GATA (SEQ ID NO: 2094) | | |
| s28 | GCGGTTATGGGCTTGC | OMNI-91 NNGNGTNA | 51.97 |
| | ATGT (SEQ ID NO: 2095) | | |
| s27 | CAGGGTCAGGGTTCTG | OMNI-93 NNGGG | 41.18 |
| | GATA (SEQ ID NO: 2096) | | |
| s36 | CAGACTTGTCACTGGA | OMNI-103 NNRACT | 79.85 |
| | TTTA (SEQ ID NO: 2097) | | |
| s35 | GAGACTCTAAATCCAG | OMNI-103 NNRACT | 76.97 |
| | TGAC (SEQ ID NO: 2098) | | |
| s21 | CGGAACCCAATCACTG | OMNI-104 NRRRH | 7.7 |
| | ACAG (SEQ ID NO: 2099) | | |
| s35 | GAGACTCTAAATCCAG | OMNI-120 NRVAC | 41.32 |
| | TGAC (SEQ ID NO: 2100) | | |
| s36 | CAGACTTGTCACTGGA | OMNI-120 NRVAC | 28.52 |
| | TTTA (SEQ ID NO: 2101) | | |
| s21 | CGGAAC | OMNI-124 NNGNRC | 25.62 |
| s35 | GAGACTCTAAATCCAG | OMNI-125 NARNC | 8.66 |
| | TGAC (SEQ ID NO: 2102) | | |
| s32 | AGGTAAGGGCAGCTTT | OMNI-126 NNNNAAG | 6.15 |
| | GGTG (SEQ ID NO: 2103) | | |
| s58 | CCAGCTGA | OMNI-127 NYAGC | 31.67 |
| s129 | ACAGCATT | OMNI-127 NYAGC | 11.97 |
| s130 | ACAGCCGC | OMNI-127 NYAGC | 60.58 |
| s44 | GGAACCCAATCACTGA | OMNI-131 NRNRCC | 24.49 |
| | CAGG (SEQ ID NO: 2104) | | |
| s11 | CTAAATCCAGTGACAA | OMNI-132 NNAANT | 27.28 |
| | GTCT (SEQ ID NO: 2105) | | |
| s59 | TCCAGTGACAAGTCTG | OMNI-138 NNNNGBNH | 79.60 |
| | TCTG (SEQ ID NO: 2106) | | |
| s34 | GTACCAGC | OMNI-159 NNNNCM | 16.74 |
| s34 | GTACCAGC | OMNI-169 NNRCCR | 16.34 |
| s101 | ACAAATCT | OMNI-173 NNAHRY | 46.25 |
| s14 | GGATAT | OMNI-173 NNAHRY | 30.50 |
| s20 | CGGCCA | OMNI-174 NNRC | 9.47 |
| s20 | CGGCCA | OMNI-175 NNRC | 8.32 |
| s20 | CGGCCA | OMNI-185 NNGM | 30.25 |
| s84 | GACGCTGC | OMNI-215 NVYGCT | 40.50 |
| s128 | AGGGTCAG | OMNI-218 NGGRKC | 65.40 |
| s22 | TGGAGC | OMNI-218 NGGRKC | 26.97 |
| s35 | GAGACTCT | OMNI-231 NVNRC | 34.19 |
| s62 | GAAACAGG | OMNI-231 NVNRC | 24.09 |
| s35 | GAGACTCT | OMNI-247 NRRRC | 8.75 |
| s35 | GAGACTCT | OMNI-250 NRNRC | 10.79 |
| s36 | CAGACTTG | OMNI-250 NRNRC | 10.40 |
| s160 | GACTCTAA | OMNI-266 NNNNCWMA | 50.61 |
| s72 | CAGCCCAG | OMNI-269 NNNNCM | 43.17 |
| s25 | CAGGGT | OMNI-274 NNRKGH | 25.67 |
| s52 | CCAGGTAA | OMNI-274 NNRKGH | 7.97 |
| s35 | GAGACTCT | OMNI-281 NNGR | 62.66 |
| s41 | CAGAAGAC | OMNI-281 NNGR | 86.30 |
| s56 | TGTACCAG | OMNI-293 NNNNCNA | 81.78 |
| s20 | CGGCCA | OMNI-295 NNRNCD | 8.23 |
| s135 | ATGTGTAT | OMNI-308 NNNNRYAT | 91.19 |
| s136 | CTTTGCAT | OMNI-308 NNNNRYAT | 34.72 |
| s95 | CCGTGTAC | OMNI-309 NNNNRWD | 7.08 |
| s74 | AATCCTCC | OMNI-316 NNNNCHY | 0.86 |
| s92 | AGAACCCT | OMNI-316 NNNNCHY | 32.85 |
| s95 | CCGTGTAC | OMNI-322 NNNNGNNC | 12.15 |
| s31 | TGAAACAG | OMNI-339 NRNAHC | 6.54 |
| s56 | TGTACCAG | OMNI-339 NRNAHC | 17.85 |
| s19 | GAACCC | OMNI-344 NNNCCC | 2.90 |
| s71 | TGACCCTG | OMNI-344 NNNCCC | 4.50 |
| s168 | AGCACAGT | OMNI-354 NRHACA | 8.45 |
| s35 | GAGACTCT | OMNI-358 NNRACY | 20.00 |
| s184 | GGTACACG | OMNI-366 NVTAM | 7.87 |
| s56 | TGTACCAG | OMNI-366 NVTAM | 4.20 |
| s35 | GAGACTCT | OMNI-368 NNNACT | 46.27 |
| s36 | CAGACTTG | OMNI-368 NNNACT | 14.88 |
| s40 | CAAAACTG | OMNI-369 NNNADC | 8.69 |
| s89 | AGCAACAG | OMNI-369 NNNADC | 16.42 |
| s69 | AGAAAAGC | OMNI-370 NNNAAA | 11.21 |
| s35 | GAGACTCT | OMNI-373 NRRAC | 3.10 |
| s92 | AGAACCCT | OMNI-375-NNAACNY | 46.10 |
| s93 | TAAACCCG | OMNI-375-NNAACNY | 4.10 |
| s180 | TTTAATCT | OMNI-376 NNYAA | 48.02 |
| s89 | AGCAACAG | OMNI-376 NNYAA | 1.35 |
| s56 | TGTACCAG | OMNI-377 NRDACC | 40.70 |
| s115 | GTGCTAGA | OMNI-378-NNG | 8.90 |
| s106 | ACCGATTT | OMNI-381 NNNGATD | 5.64 |
| s15 | GAGGAT | OMNI-381 NNNGATD | 16.72 |

TABLE 8
OMNI CRISPR Nuclease Elements

| | | SEQ ID NO | SEQ ID NO of | |
|---|---|---|---|---|
| OMNI | SEQ ID NO | of DNA | DNA sequence | OMNI |
| CRISPR | of OMNI | sequence | codon optimized | sgRNA |
| Nuclease | Amino Acid | encoding | for expression in | Scaffold |
| Name | Sequence | OMNI | human cells | Sequence |
| OMNI-75 | 1939 | 1975 | 2011 | 2047 |
| OMNI-79 | 1940 | 1976 | 2012 | 2048 |
| OMNI-91 | 1941 | 1977 | 2013 | 2049 |
| OMNI-93 | 1942 | 1978 | 2014 | 2050 |
| OMNI-103 | 1943 | 1979 | 2015 | 2051 |
| OMNI-104 | 1944 | 1980 | 2016 | 2052 |
| OMNI-120 | 1945 | 1981 | 2017 | 2053 |
| OMNI-124 | 1946 | 1982 | 2018 | 2054 |
| OMNI-125 | 1947 | 1983 | 2019 | 2055 |
| OMNI-126 | 1948 | 1984 | 2020 | 2056 |
| OMNI-127 | 1949 | 1985 | 2021 | 2057 |
| OMNI-131 | 1950 | 1986 | 2022 | 2058 |
| OMNI-132 | 1951 | 1987 | 2023 | 2059 |
| OMNI-138 | 1952 | 1988 | 2024 | 2060 |
| OMNI-159 | 1953 | 1989 | 2025 | 2061 |
| OMNI-169 | 1954 | 1990 | 2026 | 2062 |
| OMNI-173 | 1955 | 1991 | 2027 | 2063 |
| OMNI-174 | 1956 | 1992 | 2028 | 2064 |
| OMNI-175 | 1957 | 1993 | 2029 | 2065 |
| OMNI-185 | 1958 | 1994 | 2030 | 2066 |
| OMNI-215 | 1959 | 1995 | 2031 | 2067 |
| OMNI-218 | 1960 | 1996 | 2032 | 2068 |
| OMNI-231 | 1961 | 1997 | 2033 | 2069 |
| OMNI-247 | 1962 | 1998 | 2034 | 2070 |
| OMNI-250 | 1963 | 1999 | 2035 | 2071 |
| OMNI-266 | 1964 | 2000 | 2036 | 2072 |
| OMNI-269 | 1965 | 2001 | 2037 | 2073 |
| OMNI-274 | 1966 | 2002 | 2038 | 2074 |
| OMNI-281 | 1967 | 2003 | 2039 | 2075 |
| OMNI-293 | 1968 | 2004 | 2040 | 2076 |
| OMNI-295 | 1969 | 2005 | 2041 | 2077 |
| OMNI-308 | 1970 | 2006 | 2042 | 2078 |
| OMNI-309 | 1971 | 2007 | 2043 | 2079 |
| OMNI-322 | 1972 | 2008 | 2044 | 2080 |
| OMNI-339 | 1973 | 2009 | 2045 | 2081 |
| OMNI-354 | 1974 | 2010 | 2046 | 2082 |

TABLE 9
Guide Sequence Portion (“Spacer”) Elements

| | | PAM Site | Compatible OMNI |
|---|---|---|---|
| Spacer Name | Spacer Sequence | Utilized | CRISPR Nucleases |
| TRAC-S11 | GCCGUGUACCAGCUGAGAG | CTAAAT | OMNI-132 |
| | ACU (SEQ ID NO: 1110) | | |
| TRAC-S12 | CGGCCACUUUCAGGAGGAG | TCGGAA | OMNI-75 |
| | GAU (SEQ ID NO: 1920) | | |
| TRAC-S13 | CUGACCCUGCCGUGUACCA | GAGAGA | OMNI-75 |
| | GCU (SEQ ID NO: 1921) | | |
| TRAC-S15 | UAAACCCGGCCACUUUCAG | GAGGAT | |
| | GAG (SEQ ID NO: 1926) | | |
| TRAC-S19 | CCACUUUCAGGAGGAGGAU | GAACCC | |
| | UCG (SEQ ID NO: 1806) | | |
| TRAC-S20 | AGCGUCAUGAGCAGAUUAA | CGGCCA | OMNI-174, OMNI-175, |
| | ACC (SEQ ID NO: 1777) | | OMNI-185, OMNI-295 |
| TRAC-S21 | GGCCACUUUCAGGAGGAGG | CGGAAC | OMNI-104, OMNI-124 |
| | AUU (SEQ ID NO: 1922) | | |
| TRAC-S22 | CAAGAGCAACAGUGCUGUG | TGGAGC | OMNI-218 |
| | GCC (SEQ ID NO: 1927) | | |
| TRAC-S24 | ACUGUGCUAGACAUGAGGU | TGGACTTC | OMNI-103, OMNI-79 |
| | CUA (SEQ ID NO: 895) | | |
| TRAC-S25 | CUCAGCUGGUACACGGCAG | CAGGG | OMNI-274 |
| | GGU (SEQ ID NO: 1928) | | |
| TRAC-S27 | GAGUCUCUCAGCUGGUACA | CAGGGTCA | OMNI-91, OMNI-93 |
| | CGG (SEQ ID NO: 1923) | | |
| TRAC-S28 | CACCUCAGCUGGACCACAG | CAGCGTCA | OMNI-91 |
| | CCG (SEQ ID NO: 1793) | | |
| TRAC-S31 | UCAAGCUGGUCGAGAAAAG | TGAAACAG | OMNI-339 |
| | CUU (SEQ ID NO: 1421) | | |
| TRAC-S32 | AAGACACCUUCUUCCCCAG | AGGTAAGG | OMNI-126 |
| | CCC (SEQ ID NO: 847) | | |
| TRAC-S34 | UCCAGAACCCUGACCCUGC | GTACCAGC | OMNI-159, OMNI-169, |
| | CGU (SEQ ID NO: 1192) | | OMNI-171 |
| TRAC-S35 | GACCCUGCCGUGUACCAGC | GAGACTCT | OMNI-103, OMNI-120, |
| | UGA (SEQ ID NO: 1080) | | OMNI-125, OMNI-231, |
| | | | OMNI-247, OMNI-250, |
| | | | OMNI-281 |
| TRAC-S36 | UCAAAAUCGGUGAAUAGGC | CAGACTTG | OMNI-103, OMNI-120 |
| | AGA (SEQ ID NO: 1182) | | |
| TRAC-S40 | AUUCUGAUGUGUAUAUCAC | CAAAACTG | |
| | AGA (SEQ ID NO: 957) | | |
| TRAC-S41 | GCCUUCAACAACAGCAUUA | CAGAAGAC | OMNI-281 |
| | UUC (SEQ ID NO: 1929) | | |
| TRAC-S44 | GCCACUUUCAGGAGGAGGA | GGAACCCA | OMNI-131 |
| | UUC (SEQ ID NO: 1852) | | |
| TRAC-S56 | AUCCAGAACCCUGACCCUG | TGTACCAG | OMNI-131, OMNI-293, |
| | CCG (SEQ ID NO: 1924) | | OMNI-339 |
| TRAC-S58 | AGAACCCUGACCCUGCCGU | CCAGCTGA | OMNI-103 |
| | GUA (SEQ ID NO: 901) | | |
| TRAC-S59 | GUACCAGCUGAGAGACUCU | TCCAGTGA | OMNI-138 |
| | AAA (SEQ ID NO: 1138) | | |
| TRAC-S69 | UCCUGUGAUGUCAAGCUGG | AGAAAAGC | |
| | UCG (SEQ ID NO: 1422) | | |
| TRAC-S71 | GUCCCACAGAUAUCCAGAA | TGACCCTG | |
| | CCC (SEQ ID NO: 1930) | | |
| TRAC-S72 | UUCCAGAAGACACCUUCUU | CAGCCCAG | OMNI-269 |
| | CCC (SEQ ID NO: 1265) | | |
| TRAC-S74 | ACCUGUCAGUGAUUGGGUU | AATCCTCC | |
| | CCG (SEQ ID NO: 1767) | | |
| TRAC-S84 | UGGCCGGGUUUAAUCUGCU | GACGCTGC | OMNI-215 |
| | CAU (SEQ ID NO: 1899) | | |
| TRAC-S89 | CAUGAGGUCUAUGGACUUC | AGCAACAG | |
| | AAG (SEQ ID NO: 1001) | | |
| TRAC-S90 | UUCUGAUGUGUAUAUCACA | AAAACTGT | OMNI-103 |
| | GAC (SEQ ID NO: 1267) | | |
| TRAC-S91 | GCUGUGGCCUGGAGCAACA | CTGACTTT | OMNI-103 |
| | AAU (SEQ ID NO: 1120) | | |
| TRAC-S92 | UCCUCUUGUCCCACAGAUA | AGAACCCT | |
| | UCC (SEQ ID NO: 1931) | | |
| TRAC-S93 | AGCCGCAGCGUCAUGAGCA | TAAACCCG | |
| | GAU (SEQ ID NO: 1776) | | |
| TRAC-S95 | GAUAUCCAGAACCCUGACC | CCGTGTAC | OMNI-309, OMNI-322 |
| | CUG (SEQ ID NO: 1093) | | |
| TRAC-S96 | CUCAUGACGCUGCGGCUGU | CCAGCTGA | OMNI-127 |
| | GGU (SEQ ID NO: 1829) | | |
| TRAC-S101 | AACAGUGCUGUGGCCUGGA | ACAAATCT | OMNI-173 |
| | GCA (SEQ ID NO: 843) | | |
| TRAC-S106 | UGACAAGUCUGUCUGCCUA | ACCGATTT | |
| | UUC (SEQ ID NO: 1215) | | |
| TRAC-S115 | UGUGUAUAUCACAGACAAA | GTGCTAGA | |
| | ACU (SEQ ID NO: 1253) | | |
| TRAC-S124 | UCUCGACCAGCUUGACAUC | GGAACTTT | OMNI-103 |
| | ACA (SEQ ID NO: 1424) | | |
| TRAC-S128 | AGUCUCUCAGCUGGUACAC | AGGGTCAG | OMNI-218 |
| | GGC (SEQ ID NO: 930) | | |
| TRAC-S129 | GCAUGUGCAAACGCCUUCA | ACAGCATT | OMNI-127 |
| | ACA (SEQ ID NO: 1107) | | |
| TRAC-S135 | GUGUCACAAAGUAAGGAUU | ATGTGTAT | OMNI-308 |
| | CUG (SEQ ID NO: 1157) | | |
| TRAC-S142 | CGUCAUGAGCAGAUUAAAC | GCCACTTT | OMNI-103 |
| | CCG (SEQ ID NO: 1825) | | |
| TRAC-S144 | UUCUUCCCCAGCCCAGGUA | GCAGCTTT | OMNI-103 |
| | AGG (SEQ ID NO: 1932) | | |
| TRAC-S160 | CCCUGCCGUGUACCAGCUG | GACTCTAA | OMNI-266 |
| | AGA (SEQ ID NO: 1013) | | |
| TRAC-S168 | GAAGUCCAUAGACCUCAUG | AGCACAGT | OMNI-354 |
| | UCU (SEQ ID NO: 1070) | | |
| TRAC-S180 | CCUCCUCCUGAAAGUGGCC | TTTAATCT | |
| | GGG (SEQ ID NO: 1816) | | |
| TRAC-S184 | CUGGAUUUAGAGUCUCUCA | GGTACACG | |
| | GCU (SEQ ID NO: 1046) | | |

TABLE 10
Plasmid Constructs and Elements

| Plasmid | Elements | Coding ORF Sequence | Example | DNA Sequence |
|---|---|---|---|---|
| pET9a | Expressing OMNI | T7 promoter HA Tag- | pET9a-OMNI-103 | SEQ ID NO: 2083 |
| | polypeptide in the | Linker-OMNI ORF | | |
| | bacterial system | (Human optimized) - | | |
| | | SV40 NLS-8XHisTag - | | |
| | | T7 terminator | | |
| pbShuttle | Expressing OMNI | U6 promotor - | pShuttle Guide- | SEQ ID NO: 2084 |
| Guide T2 | sgRNA in the | T7promoter - T2 spacer | T2-OMNI-103 V2 | |
| | bacterial system | sgRNA scaffold - T7 | | |
| | | terminator | | |
| pbPOS T2 | Bacterial/TXTL | T2 protospacer - 8N | pbPOS T2 library | SEQ ID NO: 2085 |
| library | depletion assay | PAM library - | | |
| | | chloramphenicol | | |
| | | acetyltransferase | | |

### REFERENCES

[0169] 1. Ahmad and Allen (1992) “Antibody-mediated Specific Binging and Cytotoxicity of Lipsome-entrapped Doxorubicin to Lung Cancer Cells in Vitro”, Cancer Research 52:4817-20.
[0170] 2. Anderson (1992) “Human gene therapy”, Science 256:808-13.
[0171] 3. Anzalone et al. (2019) “Search-and-replace genomme editing without double-strand brakes or donor DNA”, Nature 576, 149-157.
[0172] 4. Basha et al. (2011) “Influence of Cationic Lipid Composition on Gene Silencing Properties of Lipid Nanoparticle Formulations of siRNA in Antigen-Presenting Cells”, Mol. Ther. 19(12):2186-200.
[0173] 5. Behr (1994) Gene transfer with synthetic cationic amphiphiles: Prospects for gene therapy”, Bioconjuage Chem 5:382-89.
[0174] 6. Blaese (1995) “Vectors in cancer therapy: how will they deliver”, Cancer Gene Ther. 2:291-97.
[0175] 7. Blaese et al. (1995) “T lympocyte-directed gene therapy for ADA-SCID: initial trial results after 4 years”, Science 270(5235):475-80.
[0176] 8. Buchschacher and Panganiban (1992) “Human immunodeficiency virus vectors for inducible expression of foreign genes”, J. Virol. 66:2731-39.
[0177] 9. Burstein et al. (2017) “New CRISPR-Cas systems from uncultivated microbes”, Nature 542:237-41.
[0178] 10. Chang and Wilson (1987) “Modification of DNA ends can decrease end-joining relative to homologous recombination in mammalian cells”, Proc. Natl. Acad. Sci. USA 84:4959-4963.
[0179] 11. Chung et al. (2006) “Agrobacterium is not alone: gene transfer to plants by viruses and other bacteria”, Trends Plant Sci. 11(1):1-4.
[0180] 12. Coelho et al. (2013) “Safety and efficacy of RNAi therapy for transthyretin amyloidosis” N. Engl. J. Med. 369, 819-829.
[0181] 13. Collias and Beisel (2021) “CRISPR technologies and the search for the PAM-free nuclease”, Nature Communications 12, 555.
[0182] 14. Crystal (1995) “Transfer of genes to humans: early lessons and obstacles to success”, Science 270(5235):404-10.
[0183] 15. Dillon (1993) “Regulation gene expression in gene therapy” Trends in Biotechnology 11(5):167-173.
[0184] 16. Dranoff et al. (1997) “A phase I study of vaccination with autologous, irradiated melanoma cells engineered to secrete human granulocyte macrophage colony stimulating factor”, Hum. Gene Ther. 8(1):111-23.
[0185] 17. Dunbar et al. (1995) “Retrovirally marked CD34-enriched peripheral blood and bone marrow cells contribute to long-term engraftment after autologous transplantation”, Blood 85:3048-57.
[0186] 18. Ellem et al. (1997) “A case report: immune responses and clinical course of the first human use of ganulocyte/macrophage-colony-stimulating-factor-tranduced autologous melanoma cells for immunotherapy”, Cancer Immunol Immunother 44:10-20.
[0187] 19. Gao and Huang (1995) “Cationic liposome-mediated gene transfer” Gene Ther. 2(10):710-22.
[0188] 20. Haddada et al. (1995) “Gene Therapy Using Adenovirus Vectors”, in: The Molecular Repertoire of Adenoviruses III: Biology and Pathogenesis, ed. Doerfler and Böhm, pp. 297-306.
[0189] 21. Han et al. (1995) “Ligand-directed retro-viral targeting of human breast cancer cells”, Proc Natl Acad Sci U.S.A. 92(21): 9747-51.
[0190] 22. Hu et al. (2018) “Evolved Cas9 variants with broad PAM compatibility and high DNA specificity”, Nature 556(7699):57-63.
[0191] 23. Jinek et al. (2012) “A programmable dual-RNA-guided DNA endonuclease in adaptive bacterial immunity,” Science 337(6096): 816-21.
[0192] 24. Johan et al. (1992) “GLVR1, a receptor for gibbon ape leukemia virus, is homologous to a phosphate permease of Neurospora crassa and is expressed at high levels in the brain and thymus”, J Virol 66(3):1635-40.
[0193] 25. Judge et al. (2006) “Design of noninflammatory synthetic siRNA mediating potent gene silencing in vivo”, Mol Ther. 13(3):494-505.
[0194] 26. Kohn et al. (1995) “Engraftment of gene-modified umbilical cord blood cells in neonates with adnosine deaminase deficiency”, Nature Medicine 1:1017-23.
[0195] 27. Kremer and Perricaudet (1995) “Adenovirus and adeno-associated virus mediated gene transfer”, Br. Med. Bull. 51(1):31-44.
[0196] 28. Macdiarmid et al. (2009) “Sequential treatment of drug-resistant tumors with targeted minicells containing siRNA or a cytotoxic drug”, Nat Biotehcnol. 27(7):643-51.
[0197] 29. Malech et al. (1997) “Prolonged production of NADPH oxidase-corrected granulocyes after gene therapy of chronic granulomatous disease”, PNAS 94(22):12133-38.
[0198] 30. Miller et al. (1991) “Construction and properties of retrovirus packaging cells based on gibbon ape leukemia virus”, J Virol. 65(5):2220-24.
[0199] 31. Miller (1992) “Human gene therapy comes of age”, Nature 357:455-60.
[0200] 32. Mitani and Caskey (1993) “Delivering therapeutic genes—matching approach and application”, Trends in Biotechnology 11(5): 162-66.
[0201] 33. Nabel and Felgner (1993) “Direct gene transfer for immunotherapy and immunization”, Trends in Biotechnology 11(5):211-15.
[0202] 34. Nishimasu et al. (2018) “Engineered CRISPR-Cas9 nuclease with expanded targeting space”, Science 361(6408): 1259-1262.
[0203] 35. Remy et al. (1994) “Gene Transfer with a Series of Lipphilic DNA-Binding Molecules”, Bioconjugate Chem. 5(6):647-54.
[0204] 36. Sentmanat et al. (2018) “A Survey of Validation Strategies for CRISPR-Cas9 Editing”, Scientific Reports 8:888, doi: 10.1038/s41598-018-19441-8.
[0205] 37. Sommerfelt et al. (1990) “Localization of the receptor gene for type D simian retroviruses on human chromosome 19”, J. Virol. 64(12):6214-20.
[0206] 38. Van Brunt (1988) “Molecular framing: transgenic animals as bioactors” Biotechnology 6:1149-54.
[0207] 39. Vigne et al. (1995) “Third-generation adenovectors for gene therapy”, Restorative Neurology and Neuroscience 8(1,2):35-36.
[0208] 40. Walton et al. (2020) “Unconstrained genome targeting with near-PAMless engineered CRISPR-Cas9 variants”, Science 368(6488):290-296.
[0209] 41. Weissman and Kariko (2015) “mRNA:Fulfilling the promise of gene therapy”, Molecular Therapy (9):1416-7.
[0210] 42. Wilson et al. (1989) “Formation of infectious hybrid virion with gibbon ape leukemia virus and human T-cell leukemia virus retroviral envelope glycoproteins and the gag and pol proteins of Moloney murine leukemia virus”, J. Virol. 63:2374-78.
[0211] 43. Yu et al. (1994) “Progress towards gene therapy for HIV infection”, Gene Ther. 1(1):13-26.
[0212] 44. Zetsche et al. (2015) “Cpfl is a single RNA-guided endonuclease of a class 2 CRIPSR-Cas system” Cell 163(3):759-71.
[0213] 45. Zuris et al. (2015) “Cationic lipid-mediated delivery of proteins enables efficient protein based genome editing in vitro and in vivo” Nat Biotechnol. 33(1):73-80.

The application's sequence listing, which the Patent Office published only in electronic form, follows.

SEQUENCE LISTING (2106 sequences)

SEQ ID NO: 1 - RNA, 20 nt, Artificial Sequence
  TRAC-targeting guide sequence portion
aaaacugugcuagacaugag

SEQ ID NO: 2 - RNA, 20 nt, Artificial Sequence
  TRAC-targeting guide sequence portion
aaacgccuucaacaacagca

SEQ ID NO: 3 - RNA, 20 nt, Artificial Sequence
  TRAC-targeting guide sequence portion
aaacugugcuagacaugagg

SEQ ID NO: 4 - RNA, 20 nt, Artificial Sequence
  TRAC-targeting guide sequence portion
aaaguaaggauucugaugug

SEQ ID NO: 5 - RNA, 20 nt, Artificial Sequence
  TRAC-targeting guide sequence portion
aaauccagugacaagucugu

SEQ ID NO: 6 - RNA, 20 nt, Artificial Sequence
  TRAC-targeting guide sequence portion
aaaucugacuuugcaugugc

SEQ ID NO: 7 - RNA, 20 nt, Artificial Sequence
  TRAC-targeting guide sequence portion
aaaugugucacaaaguaagg

SEQ ID NO: 8 - RNA, 20 nt, Artificial Sequence
  TRAC-targeting guide sequence portion
aacaaaucugacuuugcaug

SEQ ID NO: 9 - RNA, 20 nt, Artificial Sequence
  TRAC-targeting guide sequence portion
aacaacagcauuauuccaga

SEQ ID NO: 10 - RNA, 20 nt, Artificial Sequence
  TRAC-targeting guide sequence portion
aacagcauuauuccagaaga

SEQ ID NO: 11 - RNA, 20 nt, Artificial Sequence
  TRAC-targeting guide sequence portion
aacagugcuguggccuggag

SEQ ID NO: 12 - RNA, 20 nt, Artificial Sequence
  TRAC-targeting guide sequence portion
aacccugacccugccgugua

SEQ ID NO: 13 - RNA, 20 nt, Artificial Sequence
  TRAC-targeting guide sequence portion
aacgccuucaacaacagcau

SEQ ID NO: 14 - RNA, 20 nt, Artificial Sequence
  TRAC-targeting guide sequence portion
aacugugcuagacaugaggu

SEQ ID NO: 15 - RNA, 20 nt, Artificial Sequence
  TRAC-targeting guide sequence portion
aagaaggugucuucuggaau

SEQ ID NO: 16 - RNA, 20 nt, Artificial Sequence
  TRAC-targeting guide sequence portion
aagacaccuucuuccccagc

SEQ ID NO: 17 - RNA, 20 nt, Artificial Sequence
  TRAC-targeting guide sequence portion
aaggauucugauguguauau

SEQ ID NO: 18 - RNA, 20 nt, Artificial Sequence
  TRAC-targeting guide sequence portion
aaggugucuucuggaauaau

SEQ ID NO: 19 - RNA, 20 nt, Artificial Sequence
  TRAC-targeting guide sequence portion
aaguaaggauucugaugugu

SEQ ID NO: 20 - RNA, 20 nt, Artificial Sequence
  TRAC-targeting guide sequence portion
aagucagauuuguugcucca

SEQ ID NO: 21 - RNA, 20 nt, Artificial Sequence
  TRAC-targeting guide sequence portion
aagucugucugccuauucac

SEQ ID NO: 22 - RNA, 20 nt, Artificial Sequence
  TRAC-targeting guide sequence portion
aauaaugcuguuguugaagg

SEQ ID NO: 23 - RNA, 20 nt, Artificial Sequence
  TRAC-targeting guide sequence portion
aauccuuacuuugugacaca

SEQ ID NO: 24 - RNA, 20 nt, Artificial Sequence
  TRAC-targeting guide sequence portion
aaucggugaauaggcagaca

SEQ ID NO: 25 - RNA, 20 nt, Artificial Sequence
  TRAC-targeting guide sequence portion
aaucugacuuugcaugugca

SEQ ID NO: 26 - RNA, 20 nt, Artificial Sequence
  TRAC-targeting guide sequence portion
aaugcuguuguugaaggcgu

SEQ ID NO: 27 - RNA, 20 nt, Artificial Sequence
  TRAC-targeting guide sequence portion
acaaaguaaggauucugaug

SEQ ID NO: 28 - RNA, 20 nt, Artificial Sequence
  TRAC-targeting guide sequence portion
acaaaucugacuuugcaugu

SEQ ID NO: 29 - RNA, 20 nt, Artificial Sequence
  TRAC-targeting guide sequence portion
acaacagcauuauuccagaa

SEQ ID NO: 30 - RNA, 20 nt, Artificial Sequence
  TRAC-targeting guide sequence portion
acaagucugucugccuauuc

SEQ ID NO: 31 - RNA, 20 nt, Artificial Sequence
  TRAC-targeting guide sequence portion
acacaucagaauccuuacuu

SEQ ID NO: 32 - RNA, 20 nt, Artificial Sequence
  TRAC-targeting guide sequence portion
acacauuuguuugagaauca

SEQ ID NO: 33 - RNA, 20 nt, Artificial Sequence
  TRAC-targeting guide sequence portion
acaccuucuuccccagccca

SEQ ID NO: 34 - RNA, 20 nt, Artificial Sequence
  TRAC-targeting guide sequence portion
acagacaaaacugugcuaga

SEQ ID NO: 35 - RNA, 20 nt, Artificial Sequence
  TRAC-targeting guide sequence portion
acagacuugucacuggauuu

SEQ ID NO: 36 - RNA, 20 nt, Artificial Sequence
  TRAC-targeting guide sequence portion
acagauauccagaacccuga

SEQ ID NO: 37 - RNA, 20 nt, Artificial Sequence
  TRAC-targeting guide sequence portion
acagcacuguugcucuugaa

SEQ ID NO: 38 - RNA, 20 nt, Artificial Sequence
  TRAC-targeting guide sequence portion
acagcauuauuccagaagac

SEQ ID NO: 39 - RNA, 20 nt, Artificial Sequence
  TRAC-targeting guide sequence portion
acagugcuguggccuggagc

SEQ ID NO: 40 - RNA, 20 nt, Artificial Sequence
  TRAC-targeting guide sequence portion
acaguuuugucugugauaua

SEQ ID NO: 41 - RNA, 20 nt, Artificial Sequence
  TRAC-targeting guide sequence portion
acaucagaauccuuacuuug

SEQ ID NO: 42 - RNA, 20 nt, Artificial Sequence
  TRAC-targeting guide sequence portion
acaugcaaagucagauuugu

SEQ ID NO: 43 - RNA, 20 nt, Artificial Sequence
  TRAC-targeting guide sequence portion
acauuuguuugagaaucaaa

SEQ ID NO: 44 - RNA, 20 nt, Artificial Sequence
  TRAC-targeting guide sequence portion
accagcugagagacucuaaa

SEQ ID NO: 45 - RNA, 20 nt, Artificial Sequence
  TRAC-targeting guide sequence portion
acccugccguguaccagcug

SEQ ID NO: 46 - RNA, 20 nt, Artificial Sequence
  TRAC-targeting guide sequence portion
accgauuuugauucucaaac

SEQ ID NO: 47 - RNA, 20 nt, Artificial Sequence
  TRAC-targeting guide sequence portion
accucaugucuagcacaguu

SEQ ID NO: 48 - RNA, 20 nt, Artificial Sequence
  TRAC-targeting guide sequence portion
accugggcuggggaagaagg

SEQ ID NO: 49 - RNA, 20 nt, Artificial Sequence
  TRAC-targeting guide sequence portion
accuucuuccccagcccagg

SEQ ID NO: 50 - RNA, 20 nt, Artificial Sequence
  TRAC-targeting guide sequence portion
acgccuucaacaacagcauu

SEQ ID NO: 51 - RNA, 20 nt, Artificial Sequence
  TRAC-targeting guide sequence portion
acggcagggucaggguucug

SEQ ID NO: 52 - RNA, 20 nt, Artificial Sequence
  TRAC-targeting guide sequence portion
acucuaaauccagugacaag

SEQ ID NO: 53 - RNA, 20 nt, Artificial Sequence
  TRAC-targeting guide sequence portion
acuggauuuagagucucuca

SEQ ID NO: 54 - RNA, 20 nt, Artificial Sequence
  TRAC-targeting guide sequence portion
acugugcuagacaugagguc

SEQ ID NO: 55 - RNA, 20 nt, Artificial Sequence
  TRAC-targeting guide sequence portion
acuucaagagcaacagugcu

SEQ ID NO: 56 - RNA, 20 nt, Artificial Sequence
  TRAC-targeting guide sequence portion
acuugucacuggauuuagag

SEQ ID NO: 57 - RNA, 20 nt, Artificial Sequence
  TRAC-targeting guide sequence portion
acuuugcaugugcaaacgcc

SEQ ID NO: 58 - RNA, 20 nt, Artificial Sequence
  TRAC-targeting guide sequence portion
agaacccugacccugccgug

SEQ ID NO: 59 - RNA, 20 nt, Artificial Sequence
  TRAC-targeting guide sequence portion
agaagacaccuucuucccca

SEQ ID NO: 60 - RNA, 20 nt, Artificial Sequence
  TRAC-targeting guide sequence portion
agaaggugucuucuggaaua

SEQ ID NO: 61 - RNA, 20 nt, Artificial Sequence
  TRAC-targeting guide sequence portion
agaauccuuacuuugugaca

SEQ ID NO: 62 - RNA, 20 nt, Artificial Sequence
  TRAC-targeting guide sequence portion
agacaaaacugugcuagaca

SEQ ID NO: 63 - RNA, 20 nt, Artificial Sequence
  TRAC-targeting guide sequence portion
agacagacuugucacuggau

SEQ ID NO: 64 - RNA, 20 nt, Artificial Sequence
  TRAC-targeting guide sequence portion
agacaugaggucuauggacu

SEQ ID NO: 65 - RNA, 20 nt, Artificial Sequence
  TRAC-targeting guide sequence portion
agaccucaugucuagcacag

SEQ ID NO: 66 - RNA, 20 nt, Artificial Sequence
  TRAC-targeting guide sequence portion
agacucuaaauccagugaca

SEQ ID NO: 67 - RNA, 20 nt, Artificial Sequence
  TRAC-targeting guide sequence portion
agacuugucacuggauuuag

SEQ ID NO: 68 - RNA, 20 nt, Artificial Sequence
  TRAC-targeting guide sequence portion
agagacucuaaauccaguga

SEQ ID NO: 69 - RNA, 20 nt, Artificial Sequence
  TRAC-targeting guide sequence portion
agauauccagaacccugacc

SEQ ID NO: 70 - RNA, 20 nt, Artificial Sequence
  TRAC-targeting guide sequence portion
agcaacaaaucugacuuugc

SEQ ID NO: 71 - RNA, 20 nt, Artificial Sequence
  TRAC-targeting guide sequence portion
agcacaguuuugucugugau

SEQ ID NO: 72 - RNA, 20 nt, Artificial Sequence
  TRAC-targeting guide sequence portion
agcacuguugcucuugaagu

SEQ ID NO: 73 - RNA, 20 nt, Artificial Sequence
  TRAC-targeting guide sequence portion
agcauuauuccagaagacac

SEQ ID NO: 74 - RNA, 20 nt, Artificial Sequence
  TRAC-targeting guide sequence portion
agcugagagacucuaaaucc

SEQ ID NO: 75 - RNA, 20 nt, Artificial Sequence
  TRAC-targeting guide sequence portion
aggauucugauguguauauc

SEQ ID NO: 76 - RNA, 20 nt, Artificial Sequence
  TRAC-targeting guide sequence portion
aggcagacagacuugucacu

SEQ ID NO: 77 - RNA, 20 nt, Artificial Sequence
  TRAC-targeting guide sequence portion
aggcguuugcacaugcaaag

SEQ ID NO: 78 - RNA, 20 nt, Artificial Sequence
  TRAC-targeting guide sequence portion
aggucuauggacuucaagag

SEQ ID NO: 79 - RNA, 20 nt, Artificial Sequence
  TRAC-targeting guide sequence portion
aggugucuucuggaauaaug

SEQ ID NO: 80 - RNA, 20 nt, Artificial Sequence
  TRAC-targeting guide sequence portion
aguaaggauucugaugugua

SEQ ID NO: 81 - RNA, 20 nt, Artificial Sequence
  TRAC-targeting guide sequence portion
agucagauuuguugcuccag

SEQ ID NO: 82 - RNA, 20 nt, Artificial Sequence
  TRAC-targeting guide sequence portion
aguccauagaccucaugucu

SEQ ID NO: 83 - RNA, 20 nt, Artificial Sequence
  TRAC-targeting guide sequence portion
agucugucugccuauucacc

SEQ ID NO: 84 - RNA, 20 nt, Artificial Sequence
  TRAC-targeting guide sequence portion
agugacaagucugucugccu

SEQ ID NO: 85 - RNA, 20 nt, Artificial Sequence
  TRAC-targeting guide sequence portion
agugcuguggccuggagcaa

SEQ ID NO: 86 - RNA, 20 nt, Artificial Sequence
  TRAC-targeting guide sequence portion
aguuuugucugugauauaca

SEQ ID NO: 87 - RNA, 20 nt, Artificial Sequence
  TRAC-targeting guide sequence portion
auaaugcuguuguugaaggc

SEQ ID NO: 88 - RNA, 20 nt, Artificial Sequence
  TRAC-targeting guide sequence portion
auacacaucagaauccuuac

SEQ ID NO: 89 - RNA, 20 nt, Artificial Sequence
  TRAC-targeting guide sequence portion
auagaccucaugucuagcac

SEQ ID NO: 90 - RNA, 20 nt, Artificial Sequence
  TRAC-targeting guide sequence portion
auauacacaucagaauccuu

SEQ ID NO: 91 - RNA, 20 nt, Artificial Sequence
  TRAC-targeting guide sequence portion
auaucacagacaaaacugug

SEQ ID NO: 92 - RNA, 20 nt, Artificial Sequence
  TRAC-targeting guide sequence portion
aucagaauccuuacuuugug

SEQ ID NO: 93 - RNA, 20 nt, Artificial Sequence
  TRAC-targeting guide sequence portion
auccagaacccugacccugc

SEQ ID NO: 94 - RNA, 20 nt, Artificial Sequence
  TRAC-targeting guide sequence portion
auccagugacaagucugucu

SEQ ID NO: 95 - RNA, 20 nt, Artificial Sequence
  TRAC-targeting guide sequence portion
auccuuacuuugugacacau

SEQ ID NO: 96 - RNA, 20 nt, Artificial Sequence
  TRAC-targeting guide sequence portion
aucggugaauaggcagacag

SEQ ID NO: 97 - RNA, 20 nt, Artificial Sequence
  TRAC-targeting guide sequence portion
aucugacuuugcaugugcaa

SEQ ID NO: 98 - RNA, 20 nt, Artificial Sequence
  TRAC-targeting guide sequence portion
augcaaagucagauuuguug

SEQ ID NO: 99 - RNA, 20 nt, Artificial Sequence
  TRAC-targeting guide sequence portion
augcuguuguugaaggcguu

SEQ ID NO: 100 - RNA, 20 nt, Artificial Sequence
  TRAC-targeting guide sequence portion
auggacuucaagagcaacag

SEQ ID NO: 101 - RNA, 20 nt, Artificial Sequence
  TRAC-targeting guide sequence portion
augucuagcacaguuuuguc

SEQ ID NO: 102 - RNA, 20 nt, Artificial Sequence
  TRAC-targeting guide sequence portion
augugcaaacgccuucaaca

SEQ ID NO: 103 - RNA, 20 nt, Artificial Sequence
  TRAC-targeting guide sequence portion
auguguauaucacagacaaa

SEQ ID NO: 104 - RNA, 20 nt, Artificial Sequence
  TRAC-targeting guide sequence portion
augugucacaaaguaaggau

SEQ ID NO: 105 - RNA, 20 nt, Artificial Sequence
  TRAC-targeting guide sequence portion
auuauuccagaagacaccuu

SEQ ID NO: 106 - RNA, 20 nt, Artificial Sequence
  TRAC-targeting guide sequence portion
auuccagaagacaccuucuu

SEQ ID NO: 107 - RNA, 20 nt, Artificial Sequence
  TRAC-targeting guide sequence portion
auucugauguguauaucaca

SEQ ID NO: 108 - RNA, 20 nt, Artificial Sequence
  TRAC-targeting guide sequence portion
auuuagagucucucagcugg

SEQ ID NO: 109 - RNA, 20 nt, Artificial Sequence
  TRAC-targeting guide sequence portion
auuuguugcuccaggccaca

SEQ ID NO: 110 - RNA, 20 nt, Artificial Sequence
  TRAC-targeting guide sequence portion
caaaacugugcuagacauga

SEQ ID NO: 111 - RNA, 20 nt, Artificial Sequence
  TRAC-targeting guide sequence portion
caaaaucggugaauaggcag

SEQ ID NO: 112 - RNA, 20 nt, Artificial Sequence
  TRAC-targeting guide sequence portion
caaacgccuucaacaacagc

SEQ ID NO: 113 - RNA, 20 nt, Artificial Sequence
  TRAC-targeting guide sequence portion
caaaguaaggauucugaugu

SEQ ID NO: 114 - RNA, 20 nt, Artificial Sequence
  TRAC-targeting guide sequence portion
caaaucugacuuugcaugug

SEQ ID NO: 115 - RNA, 20 nt, Artificial Sequence
  TRAC-targeting guide sequence portion
caaaugugucacaaaguaag

SEQ ID NO: 116 - RNA, 20 nt, Artificial Sequence
  TRAC-targeting guide sequence portion
caacaaaucugacuuugcau

SEQ ID NO: 117 - RNA, 20 nt, Artificial Sequence
  TRAC-targeting guide sequence portion
caacagcauuauuccagaag

SEQ ID NO: 118 - RNA, 20 nt, Artificial Sequence
  TRAC-targeting guide sequence portion
caacagugcuguggccugga

SEQ ID NO: 119 - RNA, 20 nt, Artificial Sequence
  TRAC-targeting guide sequence portion
caagagcaacagugcugugg

SEQ ID NO: 120 - RNA, 20 nt, Artificial Sequence
  TRAC-targeting guide sequence portion
caagucugucugccuauuca

SEQ ID NO: 121 - RNA, 20 nt, Artificial Sequence
  TRAC-targeting guide sequence portion
cacaaaguaaggauucugau

SEQ ID NO: 122 - RNA, 20 nt, Artificial Sequence
  TRAC-targeting guide sequence portion
cacagacaaaacugugcuag

SEQ ID NO: 123 - RNA, 20 nt, Artificial Sequence
  TRAC-targeting guide sequence portion
cacagauauccagaacccug

SEQ ID NO: 124 - RNA, 20 nt, Artificial Sequence
  TRAC-targeting guide sequence portion
cacagcacuguugcucuuga

SEQ ID NO: 125 - RNA, 20 nt, Artificial Sequence
  TRAC-targeting guide sequence portion
cacaguuuugucugugauau

SEQ ID NO: 126 - RNA, 20 nt, Artificial Sequence
  TRAC-targeting guide sequence portion
cacaucagaauccuuacuuu

SEQ ID NO: 127 - RNA, 20 nt, Artificial Sequence
  TRAC-targeting guide sequence portion
cacauuuguuugagaaucaa

SEQ ID NO: 128 - RNA, 20 nt, Artificial Sequence
  TRAC-targeting guide sequence portion
caccgauuuugauucucaaa

SEQ ID NO: 129 - RNA, 20 nt, Artificial Sequence
  TRAC-targeting guide sequence portion
caccuucuuccccagcccag

SEQ ID NO: 130 - RNA, 20 nt, Artificial Sequence
  TRAC-targeting guide sequence portion
cacuggauuuagagucucuc

SEQ ID NO: 131 - RNA, 20 nt, Artificial Sequence
  TRAC-targeting guide sequence portion
cagaacccugacccugccgu

SEQ ID NO: 132 - RNA, 20 nt, Artificial Sequence
  TRAC-targeting guide sequence portion
cagaagacaccuucuucccc

SEQ ID NO: 133 - RNA, 20 nt, Artificial Sequence
  TRAC-targeting guide sequence portion
cagaauccuuacuuugugac

SEQ ID NO: 134 - RNA, 20 nt, Artificial Sequence
  TRAC-targeting guide sequence portion
cagacagacuugucacugga

SEQ ID NO: 135 - RNA, 20 nt, Artificial Sequence
  TRAC-targeting guide sequence portion
cagauauccagaacccugac

SEQ ID NO: 136 - RNA, 20 nt, Artificial Sequence
  TRAC-targeting guide sequence portion
cagauuuguugcuccaggcc

SEQ ID NO: 137 - RNA, 20 nt, Artificial Sequence
  TRAC-targeting guide sequence portion
cagcacuguugcucuugaag

SEQ ID NO: 138 - RNA, 20 nt, Artificial Sequence
  TRAC-targeting guide sequence portion
cagcauuauuccagaagaca

SEQ ID NO: 139 - RNA, 20 nt, Artificial Sequence
  TRAC-targeting guide sequence portion
caggccacagcacuguugcu

SEQ ID NO: 140 - RNA, 20 nt, Artificial Sequence
  TRAC-targeting guide sequence portion
cagggucaggguucuggaua

SEQ ID NO: 141 - RNA, 20 nt, Artificial Sequence
  TRAC-targeting guide sequence portion
cagugacaagucugucugcc

SEQ ID NO: 142 - RNA, 20 nt, Artificial Sequence
  TRAC-targeting guide sequence portion
cagugcuguggccuggagca

SEQ ID NO: 143 - RNA, 20 nt, Artificial Sequence
  TRAC-targeting guide sequence portion
caguuuugucugugauauac

SEQ ID NO: 144 - RNA, 20 nt, Artificial Sequence
  TRAC-targeting guide sequence portion
caucagaauccuuacuuugu

SEQ ID NO: 145 - RNA, 20 nt, Artificial Sequence
  TRAC-targeting guide sequence portion
caugcaaagucagauuuguu

SEQ ID NO: 146 - RNA, 20 nt, Artificial Sequence
  TRAC-targeting guide sequence portion
caugucuagcacaguuuugu

SEQ ID NO: 147 - RNA, 20 nt, Artificial Sequence
  TRAC-targeting guide sequence portion
cauuauuccagaagacaccu

SEQ ID NO: 148 - RNA, 20 nt, Artificial Sequence
  TRAC-targeting guide sequence portion
cauuuguuugagaaucaaaa

SEQ ID NO: 149 - RNA, 20 nt, Artificial Sequence
  TRAC-targeting guide sequence portion
ccacagauauccagaacccu

SEQ ID NO: 150 - RNA, 20 nt, Artificial Sequence
  TRAC-targeting guide sequence portion
ccagcugagagacucuaaau

SEQ ID NO: 151 - RNA, 20 nt, Artificial Sequence
  TRAC-targeting guide sequence portion
ccaggccacagcacuguugc

SEQ ID NO: 152 - RNA, 20 nt, Artificial Sequence
  TRAC-targeting guide sequence portion
ccagugacaagucugucugc

SEQ ID NO: 153 - RNA, 20 nt, Artificial Sequence
  TRAC-targeting guide sequence portion
ccauagaccucaugucuagc

SEQ ID NO: 154 - RNA, 20 nt, Artificial Sequence
  TRAC-targeting guide sequence portion
cccacagauauccagaaccc

SEQ ID NO: 155 - RNA, 20 nt, Artificial Sequence
  TRAC-targeting guide sequence portion
cccugacccugccguguacc

SEQ ID NO: 156 - RNA, 20 nt, Artificial Sequence
  TRAC-targeting guide sequence portion
cccuuaccugggcuggggaa

SEQ ID NO: 157 - RNA, 20 nt, Artificial Sequence
  TRAC-targeting guide sequence portion
ccgauuuugauucucaaaca

SEQ ID NO: 158 - RNA, 20 nt, Artificial Sequence
  TRAC-targeting guide sequence portion
ccuauucaccgauuuugauu

SEQ ID NO: 159 - RNA, 20 nt, Artificial Sequence
  TRAC-targeting guide sequence portion
ccugacccugccguguacca

SEQ ID NO: 160 - RNA, 20 nt, Artificial Sequence
  TRAC-targeting guide sequence portion
ccuggagcaacaaaucugac

SEQ ID NO: 161 - RNA, 20 nt, Artificial Sequence
  TRAC-targeting guide sequence portion
ccugggcuggggaagaaggu

SEQ ID NO: 162 - RNA, 20 nt, Artificial Sequence
  TRAC-targeting guide sequence portion
ccuuacuuugugacacauuu

SEQ ID NO: 163 - RNA, 20 nt, Artificial Sequence
  TRAC-targeting guide sequence portion
ccuucaacaacagcauuauu

SEQ ID NO: 164 - RNA, 20 nt, Artificial Sequence
  TRAC-targeting guide sequence portion
cgauuuugauucucaaacaa

SEQ ID NO: 165 - RNA, 20 nt, Artificial Sequence
  TRAC-targeting guide sequence portion
cgccuucaacaacagcauua

SEQ ID NO: 166 - RNA, 20 nt, Artificial Sequence
  TRAC-targeting guide sequence portion
cguguaccagcugagagacu

SEQ ID NO: 167 - RNA, 20 nt, Artificial Sequence
  TRAC-targeting guide sequence portion
cguuugcacaugcaaaguca

SEQ ID NO: 168 - RNA, 20 nt, Artificial Sequence
  TRAC-targeting guide sequence portion
cuaaauccagugacaagucu

SEQ ID NO: 169 - RNA, 20 nt, Artificial Sequence
  TRAC-targeting guide sequence portion
cuagacaugaggucuaugga

SEQ ID NO: 170 - RNA, 20 nt, Artificial Sequence
  TRAC-targeting guide sequence portion
cuagcacaguuuugucugug

SEQ ID NO: 171 - RNA, 20 nt, Artificial Sequence
  TRAC-targeting guide sequence portion
cuauggacuucaagagcaac

SEQ ID NO: 172 - RNA, 20 nt, Artificial Sequence
  TRAC-targeting guide sequence portion
cuauucaccgauuuugauuc

SEQ ID NO: 173 - RNA, 20 nt, Artificial Sequence
  TRAC-targeting guide sequence portion
cucaaacaaaugugucacaa

SEQ ID NO: 174 - RNA, 20 nt, Artificial Sequence
  TRAC-targeting guide sequence portion
cucagcugguacacggcagg

SEQ ID NO: 175 - RNA, 20 nt, Artificial Sequence
  TRAC-targeting guide sequence portion
cucaugucuagcacaguuuu

SEQ ID NO: 176 - RNA, 20 nt, Artificial Sequence
  TRAC-targeting guide sequence portion
cucuaaauccagugacaagu

SEQ ID NO: 177 - RNA, 20 nt, Artificial Sequence
  TRAC-targeting guide sequence portion
cucuugaaguccauagaccu

SEQ ID NO: 178 - RNA, 20 nt, Artificial Sequence
  TRAC-targeting guide sequence portion
cugacuuugcaugugcaaac

SEQ ID NO: 179 - RNA, 20 nt, Artificial Sequence
  TRAC-targeting guide sequence portion
cugagagacucuaaauccag

SEQ ID NO: 180 - RNA, 20 nt, Artificial Sequence
  TRAC-targeting guide sequence portion
cugauguguauaucacagac

SEQ ID NO: 181 - RNA, 20 nt, Artificial Sequence
  TRAC-targeting guide sequence portion
cugccguguaccagcugaga

SEQ ID NO: 182 - RNA, 20 nt, Artificial Sequence
  TRAC-targeting guide sequence portion
cugccuauucaccgauuuug

SEQ ID NO: 183 - RNA, 20 nt, Artificial Sequence
  TRAC-targeting guide sequence portion
cuggagcaacaaaucugacu

SEQ ID NO: 184 - RNA, 20 nt, Artificial Sequence
  TRAC-targeting guide sequence portion
cuggauuuagagucucucag

SEQ ID NO: 185 - RNA, 20 nt, Artificial Sequence
  TRAC-targeting guide sequence portion
cugggcuggggaagaaggug

SEQ ID NO: 186 - RNA, 20 nt, Artificial Sequence
  TRAC-targeting guide sequence portion
cugguacacggcagggucag

SEQ ID NO: 187 - RNA, 20 nt, Artificial Sequence
  TRAC-targeting guide sequence portion
cugucugccuauucaccgau

SEQ ID NO: 188 - RNA, 20 nt, Artificial Sequence
  TRAC-targeting guide sequence portion
cugugauauacacaucagaa

SEQ ID NO: 189 - RNA, 20 nt, Artificial Sequence
  TRAC-targeting guide sequence portion
cuguggccuggagcaacaaa

SEQ ID NO: 190 - RNA, 20 nt, Artificial Sequence
  TRAC-targeting guide sequence portion
cuguuguugaaggcguuugc

SEQ ID NO: 191 - RNA, 20 nt, Artificial Sequence
  TRAC-targeting guide sequence portion
cuuacuuugugacacauuug

SEQ ID NO: 192 - RNA, 20 nt, Artificial Sequence
  TRAC-targeting guide sequence portion
cuugaaguccauagaccuca

SEQ ID NO: 193 - RNA, 20 nt, Artificial Sequence
  TRAC-targeting guide sequence portion
cuugucacuggauuuagagu

SEQ ID NO: 194 - RNA, 20 nt, Artificial Sequence
  TRAC-targeting guide sequence portion
cuuugcaugugcaaacgccu

SEQ ID NO: 195 - RNA, 20 nt, Artificial Sequence
  TRAC-targeting guide sequence portion
cuuugugacacauuuguuug

SEQ ID NO: 196 - RNA, 20 nt, Artificial Sequence
  TRAC-targeting guide sequence portion
gaacccugacccugccgugu

SEQ ID NO: 197 - RNA, 20 nt, Artificial Sequence
  TRAC-targeting guide sequence portion
gaagaaggugucuucuggaa

SEQ ID NO: 198 - RNA, 20 nt, Artificial Sequence
  TRAC-targeting guide sequence portion
gaagacaccuucuuccccag

SEQ ID NO: 199 - RNA, 20 nt, Artificial Sequence
  TRAC-targeting guide sequence portion
gaaggcguuugcacaugcaa

SEQ ID NO: 200 - RNA, 20 nt, Artificial Sequence
  TRAC-targeting guide sequence portion
gaaggugucuucuggaauaa

SEQ ID NO: 201 - RNA, 20 nt, Artificial Sequence
  TRAC-targeting guide sequence portion
gaaguccauagaccucaugu

SEQ ID NO: 202 - RNA, 20 nt, Artificial Sequence
  TRAC-targeting guide sequence portion
gaauaaugcuguuguugaag

SEQ ID NO: 203 - RNA, 20 nt, Artificial Sequence
  TRAC-targeting guide sequence portion
gaauaggcagacagacuugu

SEQ ID NO: 204 - RNA, 20 nt, Artificial Sequence
  TRAC-targeting guide sequence portion
gaaucaaaaucggugaauag

SEQ ID NO: 205 - RNA, 20 nt, Artificial Sequence
  TRAC-targeting guide sequence portion
gaauccuuacuuugugacac

SEQ ID NO: 206 - RNA, 20 nt, Artificial Sequence
  TRAC-targeting guide sequence portion
gacacauuuguuugagaauc

SEQ ID NO: 207 - RNA, 20 nt, Artificial Sequence
  TRAC-targeting guide sequence portion
gacaugaggucuauggacuu

SEQ ID NO: 208 - RNA, 20 nt, Artificial Sequence
  TRAC-targeting guide sequence portion
gaccucaugucuagcacagu

SEQ ID NO: 209 - RNA, 20 nt, Artificial Sequence
  TRAC-targeting guide sequence portion
gacucuaaauccagugacaa

SEQ ID NO: 210 - RNA, 20 nt, Artificial Sequence
  TRAC-targeting guide sequence portion
gacuucaagagcaacagugc

SEQ ID NO: 211 - RNA, 20 nt, Artificial Sequence
  TRAC-targeting guide sequence portion
gacuugucacuggauuuaga

SEQ ID NO: 212 - RNA, 20 nt, Artificial Sequence
  TRAC-targeting guide sequence portion
gacuuugcaugugcaaacgc

SEQ ID NO: 213 - RNA, 20 nt, Artificial Sequence
  TRAC-targeting guide sequence portion
gagagacucuaaauccagug

SEQ ID NO: 214 - RNA, 20 nt, Artificial Sequence
  TRAC-targeting guide sequence portion
gagcaacaaaucugacuuug

SEQ ID NO: 215 - RNA, 20 nt, Artificial Sequence
  TRAC-targeting guide sequence portion
gaggucuauggacuucaaga

SEQ ID NO: 216 - RNA, 20 nt, Artificial Sequence
  TRAC-targeting guide sequence portion
gauauacacaucagaauccu

SEQ ID NO: 217 - RNA, 20 nt, Artificial Sequence
  TRAC-targeting guide sequence portion
gauauccagaacccugaccc

SEQ ID NO: 218 - RNA, 20 nt, Artificial Sequence
  TRAC-targeting guide sequence portion
gauguguauaucacagacaa

SEQ ID NO: 219 - RNA, 20 nt, Artificial Sequence
  TRAC-targeting guide sequence portion
gauuuagagucucucagcug

SEQ ID NO: 220 - RNA, 20 nt, Artificial Sequence
  TRAC-targeting guide sequence portion
gauuuguugcuccaggccac

SEQ ID NO: 221 - RNA, 20 nt, Artificial Sequence
  TRAC-targeting guide sequence portion
gauuuugauucucaaacaaa

SEQ ID NO: 222 - RNA, 20 nt, Artificial Sequence
  TRAC-targeting guide sequence portion
gcaaacgccuucaacaacag

SEQ ID NO: 223 - RNA, 20 nt, Artificial Sequence
  TRAC-targeting guide sequence portion
gcaaagucagauuuguugcu

SEQ ID NO: 224 - RNA, 20 nt, Artificial Sequence
  TRAC-targeting guide sequence portion
gcaacaaaucugacuuugca

SEQ ID NO: 225 - RNA, 20 nt, Artificial Sequence
  TRAC-targeting guide sequence portion
gcaacagugcuguggccugg

SEQ ID NO: 226 - RNA, 20 nt, Artificial Sequence
  TRAC-targeting guide sequence portion
gcacaguuuugucugugaua

SEQ ID NO: 227 - RNA, 20 nt, Artificial Sequence
  TRAC-targeting guide sequence portion
gcacaugcaaagucagauuu

SEQ ID NO: 228 - RNA, 20 nt, Artificial Sequence
  TRAC-targeting guide sequence portion
gcacuguugcucuugaaguc

SEQ ID NO: 229 - RNA, 20 nt, Artificial Sequence
  TRAC-targeting guide sequence portion
gcagggucaggguucuggau

SEQ ID NO: 230 - RNA, 20 nt, Artificial Sequence
  TRAC-targeting guide sequence portion
gcaugugcaaacgccuucaa

SEQ ID NO: 231 - RNA, 20 nt, Artificial Sequence
  TRAC-targeting guide sequence portion
gcauuauuccagaagacacc

SEQ ID NO: 232 - RNA, 20 nt, Artificial Sequence
  TRAC-targeting guide sequence portion
gccacagcacuguugcucuu

SEQ ID NO: 233 - RNA, 20 nt, Artificial Sequence
  TRAC-targeting guide sequence portion
gccguguaccagcugagaga

SEQ ID NO: 234 - RNA, 20 nt, Artificial Sequence
  TRAC-targeting guide sequence portion
gccuauucaccgauuuugau

SEQ ID NO: 235 - RNA, 20 nt, Artificial Sequence
  TRAC-targeting guide sequence portion
gccuggagcaacaaaucuga

SEQ ID NO: 236 - RNA, 20 nt, Artificial Sequence
  TRAC-targeting guide sequence portion
gccuucaacaacagcauuau

SEQ ID NO: 237 - RNA, 20 nt, Artificial Sequence
  TRAC-targeting guide sequence portion
gcuagacaugaggucuaugg

SEQ ID NO: 238 - RNA, 20 nt, Artificial Sequence
  TRAC-targeting guide sequence portion
gcuccaggccacagcacugu

SEQ ID NO: 239 - RNA, 20 nt, Artificial Sequence
  TRAC-targeting guide sequence portion
gcucuugaaguccauagacc

SEQ ID NO: 240 - RNA, 20 nt, Artificial Sequence
  TRAC-targeting guide sequence portion
gcugagagacucuaaaucca

SEQ ID NO: 241 - RNA, 20 nt, Artificial Sequence
  TRAC-targeting guide sequence portion
gcuguggccuggagcaacaa

SEQ ID NO: 242 - RNA, 20 nt, Artificial Sequence
  TRAC-targeting guide sequence portion
ggaagaaggugucuucugga

SEQ ID NO: 243 - RNA, 20 nt, Artificial Sequence
  TRAC-targeting guide sequence portion
ggaauaaugcuguuguugaa

SEQ ID NO: 244 - RNA, 20 nt, Artificial Sequence
  TRAC-targeting guide sequence portion
ggacuucaagagcaacagug

SEQ ID NO: 245 - RNA, 20 nt, Artificial Sequence
  TRAC-targeting guide sequence portion
ggagcaacaaaucugacuuu

SEQ ID NO: 246 - RNA, 20 nt, Artificial Sequence
  TRAC-targeting guide sequence portion
ggauuuagagucucucagcu

SEQ ID NO: 247 - RNA, 20 nt, Artificial Sequence
  TRAC-targeting guide sequence portion
ggcagacagacuugucacug

SEQ ID NO: 248 - RNA, 20 nt, Artificial Sequence
  TRAC-targeting guide sequence portion
ggcagggucaggguucugga

SEQ ID NO: 249 - RNA, 20 nt, Artificial Sequence
  TRAC-targeting guide sequence portion
ggccacagcacuguugcucu

SEQ ID NO: 250 - RNA, 20 nt, Artificial Sequence
  TRAC-targeting guide sequence portion
ggccuggagcaacaaaucug

SEQ ID NO: 251 - RNA, 20 nt, Artificial Sequence
  TRAC-targeting guide sequence portion
ggcuggggaagaaggugucu

SEQ ID NO: 252 - RNA, 20 nt, Artificial Sequence
  TRAC-targeting guide sequence portion
gggaagaaggugucuucugg

SEQ ID NO: 253 - RNA, 20 nt, Artificial Sequence
  TRAC-targeting guide sequence portion
gggcuggggaagaagguguc

SEQ ID NO: 254 - RNA, 20 nt, Artificial Sequence
  TRAC-targeting guide sequence portion
ggggaagaaggugucuucug

SEQ ID NO: 255 - RNA, 20 nt, Artificial Sequence
  TRAC-targeting guide sequence portion
gggucaggguucuggauauc

SEQ ID NO: 256 - RNA, 20 nt, Artificial Sequence
  TRAC-targeting guide sequence portion
gguacacggcagggucaggg

SEQ ID NO: 257 - RNA, 20 nt, Artificial Sequence
  TRAC-targeting guide sequence portion
ggucuauggacuucaagagc

SEQ ID NO: 258 - RNA, 20 nt, Artificial Sequence
  TRAC-targeting guide sequence portion
ggugaauaggcagacagacu

SEQ ID NO: 259 - RNA, 20 nt, Artificial Sequence
  TRAC-targeting guide sequence portion
ggugucuucuggaauaaugc

SEQ ID NO: 260 - RNA, 20 nt, Artificial Sequence
  TRAC-targeting guide sequence portion
guaaggauucugauguguau

SEQ ID NO: 261 - RNA, 20 nt, Artificial Sequence
  TRAC-targeting guide sequence portion
guacacggcagggucagggu

SEQ ID NO: 262 - RNA, 20 nt, Artificial Sequence
  TRAC-targeting guide sequence portion
guaccagcugagagacucua

SEQ ID NO: 263 - RNA, 20 nt, Artificial Sequence
  TRAC-targeting guide sequence portion
guauaucacagacaaaacug

SEQ ID NO: 264 - RNA, 20 nt, Artificial Sequence
  TRAC-targeting guide sequence portion
gucacaaaguaaggauucug

SEQ ID NO: 265 - RNA, 20 nt, Artificial Sequence
  TRAC-targeting guide sequence portion
gucacuggauuuagagucuc

SEQ ID NO: 266 - RNA, 20 nt, Artificial Sequence
  TRAC-targeting guide sequence portion
gucagauuuguugcuccagg

SEQ ID NO: 267 - RNA, 20 nt, Artificial Sequence
  TRAC-targeting guide sequence portion
guccauagaccucaugucua

SEQ ID NO: 268 - RNA, 20 nt, Artificial Sequence
  TRAC-targeting guide sequence portion
gucuagcacaguuuugucug

SEQ ID NO: 269 - RNA, 20 nt, Artificial Sequence
  TRAC-targeting guide sequence portion
gucuauggacuucaagagca

SEQ ID NO: 270 - RNA, 20 nt, Artificial Sequence
  TRAC-targeting guide sequence portion
gucugccuauucaccgauuu

SEQ ID NO: 271 - RNA, 20 nt, Artificial Sequence
  TRAC-targeting guide sequence portion
gucugucugccuauucaccg

SEQ ID NO: 272 - RNA, 20 nt, Artificial Sequence
  TRAC-targeting guide sequence portion
gucuucuggaauaaugcugu

SEQ ID NO: 273 - RNA, 20 nt, Artificial Sequence
  TRAC-targeting guide sequence portion
gugaauaggcagacagacuu

SEQ ID NO: 274 - RNA, 20 nt, Artificial Sequence
  TRAC-targeting guide sequence portion
gugacacauuuguuugagaa

SEQ ID NO: 275 - RNA, 20 nt, Artificial Sequence
  TRAC-targeting guide sequence portion
gugauauacacaucagaauc

SEQ ID NO: 276 - RNA, 20 nt, Artificial Sequence
  TRAC-targeting guide sequence portion
gugcaaacgccuucaacaac

SEQ ID NO: 277 - RNA, 20 nt, Artificial Sequence
  TRAC-targeting guide sequence portion
gugcuagacaugaggucuau

SEQ ID NO: 278 - RNA, 20 nt, Artificial Sequence
  TRAC-targeting guide sequence portion
guggccuggagcaacaaauc

SEQ ID NO: 279 - RNA, 20 nt, Artificial Sequence
  TRAC-targeting guide sequence portion
guguaccagcugagagacuc

SEQ ID NO: 280 - RNA, 20 nt, Artificial Sequence
  TRAC-targeting guide sequence portion
guguauaucacagacaaaac

SEQ ID NO: 281 - RNA, 20 nt, Artificial Sequence
  TRAC-targeting guide sequence portion
gugucacaaaguaaggauuc

SEQ ID NO: 282 - RNA, 20 nt, Artificial Sequence
  TRAC-targeting guide sequence portion
gugucuucuggaauaaugcu

SEQ ID NO: 283 - RNA, 20 nt, Artificial Sequence
  TRAC-targeting guide sequence portion
guugcuccaggccacagcac

SEQ ID NO: 284 - RNA, 20 nt, Artificial Sequence
  TRAC-targeting guide sequence portion
guugcucuugaaguccauag

SEQ ID NO: 285 - RNA, 20 nt, Artificial Sequence
  TRAC-targeting guide sequence portion
guuguugaaggcguuugcac

SEQ ID NO: 286 - RNA, 20 nt, Artificial Sequence
  TRAC-targeting guide sequence portion
guuugagaaucaaaaucggu

SEQ ID NO: 287 - RNA, 20 nt, Artificial Sequence
  TRAC-targeting guide sequence portion
guuugcacaugcaaagucag

SEQ ID NO: 288 - RNA, 20 nt, Artificial Sequence
  TRAC-targeting guide sequence portion
guuuugucugugauauacac

SEQ ID NO: 289 - RNA, 20 nt, Artificial Sequence
  TRAC-targeting guide sequence portion
uaaauccagugacaagucug

SEQ ID NO: 290 - RNA, 20 nt, Artificial Sequence
  TRAC-targeting guide sequence portion
uaaggauucugauguguaua

SEQ ID NO: 291 - RNA, 20 nt, Artificial Sequence
  TRAC-targeting guide sequence portion
uaaugcuguuguugaaggcg

SEQ ID NO: 292 - RNA, 20 nt, Artificial Sequence
  TRAC-targeting guide sequence portion
uacacaucagaauccuuacu

SEQ ID NO: 293 - RNA, 20 nt, Artificial Sequence
  TRAC-targeting guide sequence portion
uaccagcugagagacucuaa

SEQ ID NO: 294 - RNA, 20 nt, Artificial Sequence
  TRAC-targeting guide sequence portion
uaccugggcuggggaagaag

SEQ ID NO: 295 - RNA, 20 nt, Artificial Sequence
  TRAC-targeting guide sequence portion
uacuuugugacacauuuguu

SEQ ID NO: 296 - RNA, 20 nt, Artificial Sequence
  TRAC-targeting guide sequence portion
uagacaugaggucuauggac

SEQ ID NO: 297 - RNA, 20 nt, Artificial Sequence
  TRAC-targeting guide sequence portion
uagaccucaugucuagcaca

SEQ ID NO: 298 - RNA, 20 nt, Artificial Sequence
  TRAC-targeting guide sequence portion
uagagucucucagcugguac

SEQ ID NO: 299 - RNA, 20 nt, Artificial Sequence
  TRAC-targeting guide sequence portion
uagcacaguuuugucuguga

SEQ ID NO: 300 - RNA, 20 nt, Artificial Sequence
  TRAC-targeting guide sequence portion
uauaucacagacaaaacugu

SEQ ID NO: 301 - RNA, 20 nt, Artificial Sequence
  TRAC-targeting guide sequence portion
uauggacuucaagagcaaca

SEQ ID NO: 302 - RNA, 20 nt, Artificial Sequence
  TRAC-targeting guide sequence portion
uauucaccgauuuugauucu

SEQ ID NO: 303 - RNA, 20 nt, Artificial Sequence
  TRAC-targeting guide sequence portion
uauuccagaagacaccuucu

SEQ ID NO: 304 - RNA, 20 nt, Artificial Sequence
  TRAC-targeting guide sequence portion
ucaaacaaaugugucacaaa

SEQ ID NO: 305 - RNA, 20 nt, Artificial Sequence
  TRAC-targeting guide sequence portion
ucaacaacagcauuauucca

SEQ ID NO: 306 - RNA, 20 nt, Artificial Sequence
  TRAC-targeting guide sequence portion
ucaagagcaacagugcugug

SEQ ID NO: 307 - RNA, 20 nt, Artificial Sequence
  TRAC-targeting guide sequence portion
ucacaaaguaaggauucuga

SEQ ID NO: 308 - RNA, 20 nt, Artificial Sequence
  TRAC-targeting guide sequence portion
ucacagacaaaacugugcua

SEQ ID NO: 309 - RNA, 20 nt, Artificial Sequence
  TRAC-targeting guide sequence portion
ucagaauccuuacuuuguga

SEQ ID NO: 310 - RNA, 20 nt, Artificial Sequence
  TRAC-targeting guide sequence portion
ucagauuuguugcuccaggc

SEQ ID NO: 311 - RNA, 20 nt, Artificial Sequence
  TRAC-targeting guide sequence portion
ucagcugguacacggcaggg

SEQ ID NO: 312 - RNA, 20 nt, Artificial Sequence
  TRAC-targeting guide sequence portion
ucaugucuagcacaguuuug

SEQ ID NO: 313 - RNA, 20 nt, Artificial Sequence
  TRAC-targeting guide sequence portion
uccagaacccugacccugcc

SEQ ID NO: 314 - RNA, 20 nt, Artificial Sequence
  TRAC-targeting guide sequence portion
uccagaagacaccuucuucc

SEQ ID NO: 315 - RNA, 20 nt, Artificial Sequence
  TRAC-targeting guide sequence portion
uccaggccacagcacuguug

SEQ ID NO: 316 - RNA, 20 nt, Artificial Sequence
  TRAC-targeting guide sequence portion
uccagugacaagucugucug

SEQ ID NO: 317 - RNA, 20 nt, Artificial Sequence
  TRAC-targeting guide sequence portion
uccauagaccucaugucuag

SEQ ID NO: 318 - RNA, 20 nt, Artificial Sequence
  TRAC-targeting guide sequence portion
ucggugaauaggcagacaga

SEQ ID NO: 319 - RNA, 20 nt, Artificial Sequence
  TRAC-targeting guide sequence portion
ucuaaauccagugacaaguc

SEQ ID NO: 320 - RNA, 20 nt, Artificial Sequence
  TRAC-targeting guide sequence portion
ucuagcacaguuuugucugu

SEQ ID NO: 321 - RNA, 20 nt, Artificial Sequence
  TRAC-targeting guide sequence portion
ucugacuuugcaugugcaaa

SEQ ID NO: 322 - RNA, 20 nt, Artificial Sequence
  TRAC-targeting guide sequence portion
ucugauguguauaucacaga

SEQ ID NO: 323 - RNA, 20 nt, Artificial Sequence
  TRAC-targeting guide sequence portion
ucugccuauucaccgauuuu

SEQ ID NO: 324 - RNA, 20 nt, Artificial Sequence
  TRAC-targeting guide sequence portion
ucuggaauaaugcuguuguu

SEQ ID NO: 325 - RNA, 20 nt, Artificial Sequence
  TRAC-targeting guide sequence portion
ucuucuggaauaaugcuguu

SEQ ID NO: 326 - RNA, 20 nt, Artificial Sequence
  TRAC-targeting guide sequence portion
ucuugaaguccauagaccuc

SEQ ID NO: 327 - RNA, 20 nt, Artificial Sequence
  TRAC-targeting guide sequence portion
ugaaguccauagaccucaug

SEQ ID NO: 328 - RNA, 20 nt, Artificial Sequence
  TRAC-targeting guide sequence portion
ugaauaggcagacagacuug

SEQ ID NO: 329 - RNA, 20 nt, Artificial Sequence
  TRAC-targeting guide sequence portion
ugacaagucugucugccuau

SEQ ID NO: 330 - RNA, 20 nt, Artificial Sequence
  TRAC-targeting guide sequence portion
ugacccugccguguaccagc

SEQ ID NO: 331 - RNA, 20 nt, Artificial Sequence
  TRAC-targeting guide sequence portion
ugacuuugcaugugcaaacg

SEQ ID NO: 332 - RNA, 20 nt, Artificial Sequence
  TRAC-targeting guide sequence portion
ugagagacucuaaauccagu

SEQ ID NO: 333 - RNA, 20 nt, Artificial Sequence
  TRAC-targeting guide sequence portion
ugaggucuauggacuucaag

SEQ ID NO: 334 - RNA, 20 nt, Artificial Sequence
  TRAC-targeting guide sequence portion
ugauguguauaucacagaca

SEQ ID NO: 335 - RNA, 20 nt, Artificial Sequence
  TRAC-targeting guide sequence portion
ugauucucaaacaaaugugu

SEQ ID NO: 336 - RNA, 20 nt, Artificial Sequence
  TRAC-targeting guide sequence portion
ugcaaacgccuucaacaaca

SEQ ID NO: 337 - RNA, 20 nt, Artificial Sequence
  TRAC-targeting guide sequence portion
ugcaaagucagauuuguugc

SEQ ID NO: 338 - RNA, 20 nt, Artificial Sequence
  TRAC-targeting guide sequence portion
ugcacaugcaaagucagauu

SEQ ID NO: 339 - RNA, 20 nt, Artificial Sequence
  TRAC-targeting guide sequence portion
ugcaugugcaaacgccuuca

SEQ ID NO: 340 - RNA, 20 nt, Artificial Sequence
  TRAC-targeting guide sequence portion
ugccguguaccagcugagag

SEQ ID NO: 341 - RNA, 20 nt, Artificial Sequence
  TRAC-targeting guide sequence portion
ugccuauucaccgauuuuga

SEQ ID NO: 342 - RNA, 20 nt, Artificial Sequence
  TRAC-targeting guide sequence portion
ugcuagacaugaggucuaug

SEQ ID NO: 343 - RNA, 20 nt, Artificial Sequence
  TRAC-targeting guide sequence portion
ugcuccaggccacagcacug

SEQ ID NO: 344 - RNA, 20 nt, Artificial Sequence
  TRAC-targeting guide sequence portion
ugcucuugaaguccauagac

SEQ ID NO: 345 - RNA, 20 nt, Artificial Sequence
  TRAC-targeting guide sequence portion
ugcuguggccuggagcaaca

SEQ ID NO: 346 - RNA, 20 nt, Artificial Sequence
  TRAC-targeting guide sequence portion
ugcuguuguugaaggcguuu

SEQ ID NO: 347 - RNA, 20 nt, Artificial Sequence
  TRAC-targeting guide sequence portion
uggacuucaagagcaacagu

SEQ ID NO: 348 - RNA, 20 nt, Artificial Sequence
  TRAC-targeting guide sequence portion
uggagcaacaaaucugacuu

SEQ ID NO: 349 - RNA, 20 nt, Artificial Sequence
  TRAC-targeting guide sequence portion
uggccuggagcaacaaaucu

SEQ ID NO: 350 - RNA, 20 nt, Artificial Sequence
  TRAC-targeting guide sequence portion
ugggcuggggaagaaggugu

SEQ ID NO: 351 - RNA, 20 nt, Artificial Sequence
  TRAC-targeting guide sequence portion
uggggaagaaggugucuucu

SEQ ID NO: 352 - RNA, 20 nt, Artificial Sequence
  TRAC-targeting guide sequence portion
ugguacacggcagggucagg

SEQ ID NO: 353 - RNA, 20 nt, Artificial Sequence
  TRAC-targeting guide sequence portion
uguaccagcugagagacucu

SEQ ID NO: 354 - RNA, 20 nt, Artificial Sequence
  TRAC-targeting guide sequence portion
uguauaucacagacaaaacu

SEQ ID NO: 355 - RNA, 20 nt, Artificial Sequence
  TRAC-targeting guide sequence portion
ugucacaaaguaaggauucu

SEQ ID NO: 356 - RNA, 20 nt, Artificial Sequence
  TRAC-targeting guide sequence portion
ugucacuggauuuagagucu

SEQ ID NO: 357 - RNA, 20 nt, Artificial Sequence
  TRAC-targeting guide sequence portion
ugucuagcacaguuuugucu

SEQ ID NO: 358 - RNA, 20 nt, Artificial Sequence
  TRAC-targeting guide sequence portion
ugucugugauauacacauca

SEQ ID NO: 359 - RNA, 20 nt, Artificial Sequence
  TRAC-targeting guide sequence portion
ugucuucuggaauaaugcug

SEQ ID NO: 360 - RNA, 20 nt, Artificial Sequence
  TRAC-targeting guide sequence portion
ugugacacauuuguuugaga

SEQ ID NO: 361 - RNA, 20 nt, Artificial Sequence
  TRAC-targeting guide sequence portion
ugugauauacacaucagaau

SEQ ID NO: 362 - RNA, 20 nt, Artificial Sequence
  TRAC-targeting guide sequence portion
uguggccuggagcaacaaau

SEQ ID NO: 363 - RNA, 20 nt, Artificial Sequence
  TRAC-targeting guide sequence portion
uguguauaucacagacaaaa

SEQ ID NO: 364 - RNA, 20 nt, Artificial Sequence
  TRAC-targeting guide sequence portion
ugugucacaaaguaaggauu

SEQ ID NO: 365 - RNA, 20 nt, Artificial Sequence
  TRAC-targeting guide sequence portion
uguugaaggcguuugcacau

SEQ ID NO: 366 - RNA, 20 nt, Artificial Sequence
  TRAC-targeting guide sequence portion
uguugcuccaggccacagca

SEQ ID NO: 367 - RNA, 20 nt, Artificial Sequence
  TRAC-targeting guide sequence portion
uguugcucuugaaguccaua

SEQ ID NO: 368 - RNA, 20 nt, Artificial Sequence
  TRAC-targeting guide sequence portion
uguuguugaaggcguuugca

SEQ ID NO: 369 - RNA, 20 nt, Artificial Sequence
  TRAC-targeting guide sequence portion
uguuugagaaucaaaaucgg

SEQ ID NO: 370 - RNA, 20 nt, Artificial Sequence
  TRAC-targeting guide sequence portion
uuaccugggcuggggaagaa

SEQ ID NO: 371 - RNA, 20 nt, Artificial Sequence
  TRAC-targeting guide sequence portion
uuagagucucucagcuggua

SEQ ID NO: 372 - RNA, 20 nt, Artificial Sequence
  TRAC-targeting guide sequence portion
uuauuccagaagacaccuuc

SEQ ID NO: 373 - RNA, 20 nt, Artificial Sequence
  TRAC-targeting guide sequence portion
uucaagagcaacagugcugu

SEQ ID NO: 374 - RNA, 20 nt, Artificial Sequence
  TRAC-targeting guide sequence portion
uucaccgauuuugauucuca

SEQ ID NO: 375 - RNA, 20 nt, Artificial Sequence
  TRAC-targeting guide sequence portion
uuccagaagacaccuucuuc

SEQ ID NO: 376 - RNA, 20 nt, Artificial Sequence
  TRAC-targeting guide sequence portion
uucucaaacaaaugugucac

SEQ ID NO: 377 - RNA, 20 nt, Artificial Sequence
  TRAC-targeting guide sequence portion
uucugauguguauaucacag

SEQ ID NO: 378 - RNA, 20 nt, Artificial Sequence
  TRAC-targeting guide sequence portion
uucuggaauaaugcuguugu

SEQ ID NO: 379 - RNA, 20 nt, Artificial Sequence
  TRAC-targeting guide sequence portion
uugaaggcguuugcacaugc

SEQ ID NO: 380 - RNA, 20 nt, Artificial Sequence
  TRAC-targeting guide sequence portion
uugaaguccauagaccucau

SEQ ID NO: 381 - RNA, 20 nt, Artificial Sequence
  TRAC-targeting guide sequence portion
uugagaaucaaaaucgguga

SEQ ID NO: 382 - RNA, 20 nt, Artificial Sequence
  TRAC-targeting guide sequence portion
uugauucucaaacaaaugug

SEQ ID NO: 383 - RNA, 20 nt, Artificial Sequence
  TRAC-targeting guide sequence portion
uugcacaugcaaagucagau

SEQ ID NO: 384 - RNA, 20 nt, Artificial Sequence
  TRAC-targeting guide sequence portion
uugcaugugcaaacgccuuc

SEQ ID NO: 385 - RNA, 20 nt, Artificial Sequence
  TRAC-targeting guide sequence portion
uugcucuugaaguccauaga

SEQ ID NO: 386 - RNA, 20 nt, Artificial Sequence
  TRAC-targeting guide sequence portion
uugucacuggauuuagaguc

SEQ ID NO: 387 - RNA, 20 nt, Artificial Sequence
  TRAC-targeting guide sequence portion
uugugacacauuuguuugag

SEQ ID NO: 388 - RNA, 20 nt, Artificial Sequence
  TRAC-targeting guide sequence portion
uuguugaaggcguuugcaca

SEQ ID NO: 389 - RNA, 20 nt, Artificial Sequence
  TRAC-targeting guide sequence portion
uuguugcuccaggccacagc

SEQ ID NO: 390 - RNA, 20 nt, Artificial Sequence
  TRAC-targeting guide sequence portion
uuuagagucucucagcuggu

SEQ ID NO: 391 - RNA, 20 nt, Artificial Sequence
  TRAC-targeting guide sequence portion
uuugauucucaaacaaaugu

SEQ ID NO: 392 - RNA, 20 nt, Artificial Sequence
  TRAC-targeting guide sequence portion
uuugcacaugcaaagucaga

SEQ ID NO: 393 - RNA, 20 nt, Artificial Sequence
  TRAC-targeting guide sequence portion
uuugcaugugcaaacgccuu

SEQ ID NO: 394 - RNA, 20 nt, Artificial Sequence
  TRAC-targeting guide sequence portion
uuugugacacauuuguuuga

SEQ ID NO: 395 - RNA, 20 nt, Artificial Sequence
  TRAC-targeting guide sequence portion
uuuguugcuccaggccacag

SEQ ID NO: 396 - RNA, 20 nt, Artificial Sequence
  TRAC-targeting guide sequence portion
uuuguuugagaaucaaaauc

SEQ ID NO: 397 - RNA, 20 nt, Artificial Sequence
  TRAC-targeting guide sequence portion
uuuugauucucaaacaaaug

SEQ ID NO: 398 - RNA, 20 nt, Artificial Sequence
  TRAC-targeting guide sequence portion
uuuugucugugauauacaca

SEQ ID NO: 399 - RNA, 21 nt, Artificial Sequence
  TRAC-targeting guide sequence portion
aaaacugugcuagacaugagg

SEQ ID NO: 400 - RNA, 21 nt, Artificial Sequence
  TRAC-targeting guide sequence portion
aaaaucggugaauaggcagac

SEQ ID NO: 401 - RNA, 21 nt, Artificial Sequence
  TRAC-targeting guide sequence portion
aaacgccuucaacaacagcau

SEQ ID NO: 402 - RNA, 21 nt, Artificial Sequence
  TRAC-targeting guide sequence portion
aaacugugcuagacaugaggu

SEQ ID NO: 403 - RNA, 21 nt, Artificial Sequence
  TRAC-targeting guide sequence portion
aaauccagugacaagucuguc

SEQ ID NO: 404 - RNA, 21 nt, Artificial Sequence
  TRAC-targeting guide sequence portion
aaaucggugaauaggcagaca

SEQ ID NO: 405 - RNA, 21 nt, Artificial Sequence
  TRAC-targeting guide sequence portion
aaaucugacuuugcaugugca

SEQ ID NO: 406 - RNA, 21 nt, Artificial Sequence
  TRAC-targeting guide sequence portion
aaaugugucacaaaguaagga

SEQ ID NO: 407 - RNA, 21 nt, Artificial Sequence
  TRAC-targeting guide sequence portion
aacaaaucugacuuugcaugu

SEQ ID NO: 408 - RNA, 21 nt, Artificial Sequence
  TRAC-targeting guide sequence portion
aacaaaugugucacaaaguaa

SEQ ID NO: 409 - RNA, 21 nt, Artificial Sequence
  TRAC-targeting guide sequence portion
aacaacagcauuauuccagaa

SEQ ID NO: 410 - RNA, 21 nt, Artificial Sequence
  TRAC-targeting guide sequence portion
aacagcauuauuccagaagac

SEQ ID NO: 411 - RNA, 21 nt, Artificial Sequence
  TRAC-targeting guide sequence portion
aacagugcuguggccuggagc

SEQ ID NO: 412 - RNA, 21 nt, Artificial Sequence
  TRAC-targeting guide sequence portion
aacgccuucaacaacagcauu

SEQ ID NO: 413 - RNA, 21 nt, Artificial Sequence
  TRAC-targeting guide sequence portion
aacugugcuagacaugagguc

SEQ ID NO: 414 - RNA, 21 nt, Artificial Sequence
  TRAC-targeting guide sequence portion
aagaaggugucuucuggaaua

SEQ ID NO: 415 - RNA, 21 nt, Artificial Sequence
  TRAC-targeting guide sequence portion
aagacaccuucuuccccagcc

SEQ ID NO: 416 - RNA, 21 nt, Artificial Sequence
  TRAC-targeting guide sequence portion
aaggauucugauguguauauc

SEQ ID NO: 417 - RNA, 21 nt, Artificial Sequence
  TRAC-targeting guide sequence portion
aaggcguuugcacaugcaaag

SEQ ID NO: 418 - RNA, 21 nt, Artificial Sequence
  TRAC-targeting guide sequence portion
aaggugucuucuggaauaaug

SEQ ID NO: 419 - RNA, 21 nt, Artificial Sequence
  TRAC-targeting guide sequence portion
aaguaaggauucugaugugua

SEQ ID NO: 420 - RNA, 21 nt, Artificial Sequence
  TRAC-targeting guide sequence portion
aagucagauuuguugcuccag

SEQ ID NO: 421 - RNA, 21 nt, Artificial Sequence
  TRAC-targeting guide sequence portion
aaguccauagaccucaugucu

SEQ ID NO: 422 - RNA, 21 nt, Artificial Sequence
  TRAC-targeting guide sequence portion
aagucugucugccuauucacc

SEQ ID NO: 423 - RNA, 21 nt, Artificial Sequence
  TRAC-targeting guide sequence portion
aauaaugcuguuguugaaggc

SEQ ID NO: 424 - RNA, 21 nt, Artificial Sequence
  TRAC-targeting guide sequence portion
aaucaaaaucggugaauaggc

SEQ ID NO: 425 - RNA, 21 nt, Artificial Sequence
  TRAC-targeting guide sequence portion
aauccagugacaagucugucu

SEQ ID NO: 426 - RNA, 21 nt, Artificial Sequence
  TRAC-targeting guide sequence portion
aaucggugaauaggcagacag

SEQ ID NO: 427 - RNA, 21 nt, Artificial Sequence
  TRAC-targeting guide sequence portion
aaucugacuuugcaugugcaa

SEQ ID NO: 428 - RNA, 21 nt, Artificial Sequence
  TRAC-targeting guide sequence portion
aaugcuguuguugaaggcguu

SEQ ID NO: 429 - RNA, 21 nt, Artificial Sequence
  TRAC-targeting guide sequence portion
aaugugucacaaaguaaggau

SEQ ID NO: 430 - RNA, 21 nt, Artificial Sequence
  TRAC-targeting guide sequence portion
acaaaacugugcuagacauga

SEQ ID NO: 431 - RNA, 21 nt, Artificial Sequence
  TRAC-targeting guide sequence portion
acaaaucugacuuugcaugug

SEQ ID NO: 432 - RNA, 21 nt, Artificial Sequence
  TRAC-targeting guide sequence portion
acaaaugugucacaaaguaag

SEQ ID NO: 433 - RNA, 21 nt, Artificial Sequence
  TRAC-targeting guide sequence portion
acaacagcauuauuccagaag

SEQ ID NO: 434 - RNA, 21 nt, Artificial Sequence
  TRAC-targeting guide sequence portion
acaagucugucugccuauuca

SEQ ID NO: 435 - RNA, 21 nt, Artificial Sequence
  TRAC-targeting guide sequence portion
acacaucagaauccuuacuuu

SEQ ID NO: 436 - RNA, 21 nt, Artificial Sequence
  TRAC-targeting guide sequence portion
acacauuuguuugagaaucaa

SEQ ID NO: 437 - RNA, 21 nt, Artificial Sequence
  TRAC-targeting guide sequence portion
acaccuucuuccccagcccag

SEQ ID NO: 438 - RNA, 21 nt, Artificial Sequence
  TRAC-targeting guide sequence portion
acacggcagggucaggguucu

SEQ ID NO: 439 - RNA, 21 nt, Artificial Sequence
  TRAC-targeting guide sequence portion
acagacuugucacuggauuua

SEQ ID NO: 440 - RNA, 21 nt, Artificial Sequence
  TRAC-targeting guide sequence portion
acagauauccagaacccugac

SEQ ID NO: 441 - RNA, 21 nt, Artificial Sequence
  TRAC-targeting guide sequence portion
acagcacuguugcucuugaag

SEQ ID NO: 442 - RNA, 21 nt, Artificial Sequence
  TRAC-targeting guide sequence portion
acagcauuauuccagaagaca

SEQ ID NO: 443 - RNA, 21 nt, Artificial Sequence
  TRAC-targeting guide sequence portion
acagugcuguggccuggagca

SEQ ID NO: 444 - RNA, 21 nt, Artificial Sequence
  TRAC-targeting guide sequence portion
acaguuuugucugugauauac

SEQ ID NO: 445 - RNA, 21 nt, Artificial Sequence
  TRAC-targeting guide sequence portion
acaucagaauccuuacuuugu

SEQ ID NO: 446 - RNA, 21 nt, Artificial Sequence
  TRAC-targeting guide sequence portion
acaugaggucuauggacuuca

SEQ ID NO: 447 - RNA, 21 nt, Artificial Sequence
  TRAC-targeting guide sequence portion
acaugcaaagucagauuuguu

SEQ ID NO: 448 - RNA, 21 nt, Artificial Sequence
  TRAC-targeting guide sequence portion
acauuuguuugagaaucaaaa

SEQ ID NO: 449 - RNA, 21 nt, Artificial Sequence
  TRAC-targeting guide sequence portion
accagcugagagacucuaaau

SEQ ID NO: 450 - RNA, 21 nt, Artificial Sequence
  TRAC-targeting guide sequence portion
acccugacccugccguguacc

SEQ ID NO: 451 - RNA, 21 nt, Artificial Sequence
  TRAC-targeting guide sequence portion
acccugccguguaccagcuga

SEQ ID NO: 452 - RNA, 21 nt, Artificial Sequence
  TRAC-targeting guide sequence portion
accgauuuugauucucaaaca

SEQ ID NO: 453 - RNA, 21 nt, Artificial Sequence
  TRAC-targeting guide sequence portion
accucaugucuagcacaguuu

SEQ ID NO: 454 - RNA, 21 nt, Artificial Sequence
  TRAC-targeting guide sequence portion
accugggcuggggaagaaggu

SEQ ID NO: 455 - RNA, 21 nt, Artificial Sequence
  TRAC-targeting guide sequence portion
acggcagggucaggguucugg

SEQ ID NO: 456 - RNA, 21 nt, Artificial Sequence
  TRAC-targeting guide sequence portion
acucuaaauccagugacaagu

SEQ ID NO: 457 - RNA, 21 nt, Artificial Sequence
  TRAC-targeting guide sequence portion
acuggauuuagagucucucag

SEQ ID NO: 458 - RNA, 21 nt, Artificial Sequence
  TRAC-targeting guide sequence portion
acuguugcucuugaaguccau

SEQ ID NO: 459 - RNA, 21 nt, Artificial Sequence
  TRAC-targeting guide sequence portion
acuucaagagcaacagugcug

SEQ ID NO: 460 - RNA, 21 nt, Artificial Sequence
  TRAC-targeting guide sequence portion
acuugucacuggauuuagagu

SEQ ID NO: 461 - RNA, 21 nt, Artificial Sequence
  TRAC-targeting guide sequence portion
acuuugcaugugcaaacgccu

SEQ ID NO: 462 - RNA, 21 nt, Artificial Sequence
  TRAC-targeting guide sequence portion
acuuugugacacauuuguuug

SEQ ID NO: 463 - RNA, 21 nt, Artificial Sequence
  TRAC-targeting guide sequence portion
agaacccugacccugccgugu

SEQ ID NO: 464 - RNA, 21 nt, Artificial Sequence
  TRAC-targeting guide sequence portion
agaagacaccuucuuccccag

SEQ ID NO: 465 - RNA, 21 nt, Artificial Sequence
  TRAC-targeting guide sequence portion
agaaggugucuucuggaauaa

SEQ ID NO: 466 - RNA, 21 nt, Artificial Sequence
  TRAC-targeting guide sequence portion
agaauccuuacuuugugacac

SEQ ID NO: 467 - RNA, 21 nt, Artificial Sequence
  TRAC-targeting guide sequence portion
agacaaaacugugcuagacau

SEQ ID NO: 468 - RNA, 21 nt, Artificial Sequence
  TRAC-targeting guide sequence portion
agacaccuucuuccccagccc

SEQ ID NO: 469 - RNA, 21 nt, Artificial Sequence
  TRAC-targeting guide sequence portion
agacaugaggucuauggacuu

SEQ ID NO: 470 - RNA, 21 nt, Artificial Sequence
  TRAC-targeting guide sequence portion
agaccucaugucuagcacagu

SEQ ID NO: 471 - RNA, 21 nt, Artificial Sequence
  TRAC-targeting guide sequence portion
agacucuaaauccagugacaa

SEQ ID NO: 472 - RNA, 21 nt, Artificial Sequence
  TRAC-targeting guide sequence portion
agacuugucacuggauuuaga

SEQ ID NO: 473 - RNA, 21 nt, Artificial Sequence
  TRAC-targeting guide sequence portion
agagacucuaaauccagugac

SEQ ID NO: 474 - RNA, 21 nt, Artificial Sequence
  TRAC-targeting guide sequence portion
agagcaacagugcuguggccu

SEQ ID NO: 475 - RNA, 21 nt, Artificial Sequence
  TRAC-targeting guide sequence portion
agagucucucagcugguacac

SEQ ID NO: 476 - RNA, 21 nt, Artificial Sequence
  TRAC-targeting guide sequence portion
agauauccagaacccugaccc

SEQ ID NO: 477 - RNA, 21 nt, Artificial Sequence
  TRAC-targeting guide sequence portion
agauuuguugcuccaggccac

SEQ ID NO: 478 - RNA, 21 nt, Artificial Sequence
  TRAC-targeting guide sequence portion
agcaacagugcuguggccugg

SEQ ID NO: 479 - RNA, 21 nt, Artificial Sequence
  TRAC-targeting guide sequence portion
agcacaguuuugucugugaua

SEQ ID NO: 480 - RNA, 21 nt, Artificial Sequence
  TRAC-targeting guide sequence portion
agcauuauuccagaagacacc

SEQ ID NO: 481 - RNA, 21 nt, Artificial Sequence
  TRAC-targeting guide sequence portion
agcugagagacucuaaaucca

SEQ ID NO: 482 - RNA, 21 nt, Artificial Sequence
  TRAC-targeting guide sequence portion
agcugguacacggcaggguca

SEQ ID NO: 483 - RNA, 21 nt, Artificial Sequence
  TRAC-targeting guide sequence portion
aggauucugauguguauauca

SEQ ID NO: 484 - RNA, 21 nt, Artificial Sequence
  TRAC-targeting guide sequence portion
aggcagacagacuugucacug

SEQ ID NO: 485 - RNA, 21 nt, Artificial Sequence
  TRAC-targeting guide sequence portion
aggccacagcacuguugcucu

SEQ ID NO: 486 - RNA, 21 nt, Artificial Sequence
  TRAC-targeting guide sequence portion
aggcguuugcacaugcaaagu

SEQ ID NO: 487 - RNA, 21 nt, Artificial Sequence
  TRAC-targeting guide sequence portion
agggucaggguucuggauauc

SEQ ID NO: 488 - RNA, 21 nt, Artificial Sequence
  TRAC-targeting guide sequence portion
aggucuauggacuucaagagc

SEQ ID NO: 489 - RNA, 21 nt, Artificial Sequence
  TRAC-targeting guide sequence portion
aggugucuucuggaauaaugc

SEQ ID NO: 490 - RNA, 21 nt, Artificial Sequence
  TRAC-targeting guide sequence portion
agucagauuuguugcuccagg

SEQ ID NO: 491 - RNA, 21 nt, Artificial Sequence
  TRAC-targeting guide sequence portion
aguccauagaccucaugucua

SEQ ID NO: 492 - RNA, 21 nt, Artificial Sequence
  TRAC-targeting guide sequence portion
agucugucugccuauucaccg

SEQ ID NO: 493 - RNA, 21 nt, Artificial Sequence
  TRAC-targeting guide sequence portion
agugacaagucugucugccua

SEQ ID NO: 494 - RNA, 21 nt, Artificial Sequence
  TRAC-targeting guide sequence portion
agugcuguggccuggagcaac

SEQ ID NO: 495 - RNA, 21 nt, Artificial Sequence
  TRAC-targeting guide sequence portion
aguuuugucugugauauacac

SEQ ID NO: 496 - RNA, 21 nt, Artificial Sequence
  TRAC-targeting guide sequence portion
auaaugcuguuguugaaggcg

SEQ ID NO: 497 - RNA, 21 nt, Artificial Sequence
  TRAC-targeting guide sequence portion
auacacaucagaauccuuacu

SEQ ID NO: 498 - RNA, 21 nt, Artificial Sequence
  TRAC-targeting guide sequence portion
auagaccucaugucuagcaca

SEQ ID NO: 499 - RNA, 21 nt, Artificial Sequence
  TRAC-targeting guide sequence portion
auaggcagacagacuugucac

SEQ ID NO: 500 - RNA, 21 nt, Artificial Sequence
  TRAC-targeting guide sequence portion
auaucacagacaaaacugugc

SEQ ID NO: 501 - RNA, 21 nt, Artificial Sequence
  TRAC-targeting guide sequence portion
auauccagaacccugacccug

SEQ ID NO: 502 - RNA, 21 nt, Artificial Sequence
  TRAC-targeting guide sequence portion
aucaaaaucggugaauaggca

SEQ ID NO: 503 - RNA, 21 nt, Artificial Sequence
  TRAC-targeting guide sequence portion
aucacagacaaaacugugcua

SEQ ID NO: 504 - RNA, 21 nt, Artificial Sequence
  TRAC-targeting guide sequence portion
aucagaauccuuacuuuguga

SEQ ID NO: 505 - RNA, 21 nt, Artificial Sequence
  TRAC-targeting guide sequence portion
auccagaacccugacccugcc

SEQ ID NO: 506 - RNA, 21 nt, Artificial Sequence
  TRAC-targeting guide sequence portion
auccagugacaagucugucug

SEQ ID NO: 507 - RNA, 21 nt, Artificial Sequence
  TRAC-targeting guide sequence portion
auccuuacuuugugacacauu

SEQ ID NO: 508 - RNA, 21 nt, Artificial Sequence
  TRAC-targeting guide sequence portion
aucggugaauaggcagacaga

SEQ ID NO: 509 - RNA, 21 nt, Artificial Sequence
  TRAC-targeting guide sequence portion
aucugacuuugcaugugcaaa

SEQ ID NO: 510 - RNA, 21 nt, Artificial Sequence
  TRAC-targeting guide sequence portion
augaggucuauggacuucaag

SEQ ID NO: 511 - RNA, 21 nt, Artificial Sequence
  TRAC-targeting guide sequence portion
augcaaagucagauuuguugc

SEQ ID NO: 512 - RNA, 21 nt, Artificial Sequence
  TRAC-targeting guide sequence portion
augcuguuguugaaggcguuu

SEQ ID NO: 513 - RNA, 21 nt, Artificial Sequence
  TRAC-targeting guide sequence portion
auggacuucaagagcaacagu

SEQ ID NO: 514 - RNA, 21 nt, Artificial Sequence
  TRAC-targeting guide sequence portion
augucuagcacaguuuugucu

SEQ ID NO: 515 - RNA, 21 nt, Artificial Sequence
  TRAC-targeting guide sequence portion
augugcaaacgccuucaacaa

SEQ ID NO: 516 - RNA, 21 nt, Artificial Sequence
  TRAC-targeting guide sequence portion
auguguauaucacagacaaaa

SEQ ID NO: 517 - RNA, 21 nt, Artificial Sequence
  TRAC-targeting guide sequence portion
augugucacaaaguaaggauu

SEQ ID NO: 518 - RNA, 21 nt, Artificial Sequence
  TRAC-targeting guide sequence portion
auuccagaagacaccuucuuc

SEQ ID NO: 519 - RNA, 21 nt, Artificial Sequence
  TRAC-targeting guide sequence portion
auuuagagucucucagcuggu

SEQ ID NO: 520 - RNA, 21 nt, Artificial Sequence
  TRAC-targeting guide sequence portion
auuuguugcuccaggccacag

SEQ ID NO: 521 - RNA, 21 nt, Artificial Sequence
  TRAC-targeting guide sequence portion
caaaacugugcuagacaugag

SEQ ID NO: 522 - RNA, 21 nt, Artificial Sequence
  TRAC-targeting guide sequence portion
caaacgccuucaacaacagca

SEQ ID NO: 523 - RNA, 21 nt, Artificial Sequence
  TRAC-targeting guide sequence portion
caaagucagauuuguugcucc

SEQ ID NO: 524 - RNA, 21 nt, Artificial Sequence
  TRAC-targeting guide sequence portion
caaaucugacuuugcaugugc

SEQ ID NO: 525 - RNA, 21 nt, Artificial Sequence
  TRAC-targeting guide sequence portion
caaaugugucacaaaguaagg

SEQ ID NO: 526 - RNA, 21 nt, Artificial Sequence
  TRAC-targeting guide sequence portion
caacaaaucugacuuugcaug

SEQ ID NO: 527 - RNA, 21 nt, Artificial Sequence
  TRAC-targeting guide sequence portion
caacaacagcauuauuccaga

SEQ ID NO: 528 - RNA, 21 nt, Artificial Sequence
  TRAC-targeting guide sequence portion
caacagcauuauuccagaaga

SEQ ID NO: 529 - RNA, 21 nt, Artificial Sequence
  TRAC-targeting guide sequence portion
caacagugcuguggccuggag

SEQ ID NO: 530 - RNA, 21 nt, Artificial Sequence
  TRAC-targeting guide sequence portion
caagucugucugccuauucac

SEQ ID NO: 531 - RNA, 21 nt, Artificial Sequence
  TRAC-targeting guide sequence portion
cacagacaaaacugugcuaga

SEQ ID NO: 532 - RNA, 21 nt, Artificial Sequence
  TRAC-targeting guide sequence portion
cacagcacuguugcucuugaa

SEQ ID NO: 533 - RNA, 21 nt, Artificial Sequence
  TRAC-targeting guide sequence portion
cacaucagaauccuuacuuug

SEQ ID NO: 534 - RNA, 21 nt, Artificial Sequence
  TRAC-targeting guide sequence portion
cacauuuguuugagaaucaaa

SEQ ID NO: 535 - RNA, 21 nt, Artificial Sequence
  TRAC-targeting guide sequence portion
caccgauuuugauucucaaac

SEQ ID NO: 536 - RNA, 21 nt, Artificial Sequence
  TRAC-targeting guide sequence portion
caccuucuuccccagcccagg

SEQ ID NO: 537 - RNA, 21 nt, Artificial Sequence
  TRAC-targeting guide sequence portion
cacuguugcucuugaagucca

SEQ ID NO: 538 - RNA, 21 nt, Artificial Sequence
  TRAC-targeting guide sequence portion
cagaacccugacccugccgug

SEQ ID NO: 539 - RNA, 21 nt, Artificial Sequence
  TRAC-targeting guide sequence portion
cagaagacaccuucuucccca

SEQ ID NO: 540 - RNA, 21 nt, Artificial Sequence
  TRAC-targeting guide sequence portion
cagaauccuuacuuugugaca

SEQ ID NO: 541 - RNA, 21 nt, Artificial Sequence
  TRAC-targeting guide sequence portion
cagacaaaacugugcuagaca

SEQ ID NO: 542 - RNA, 21 nt, Artificial Sequence
  TRAC-targeting guide sequence portion
cagacagacuugucacuggau

SEQ ID NO: 543 - RNA, 21 nt, Artificial Sequence
  TRAC-targeting guide sequence portion
cagacuugucacuggauuuag

SEQ ID NO: 544 - RNA, 21 nt, Artificial Sequence
  TRAC-targeting guide sequence portion
cagauauccagaacccugacc

SEQ ID NO: 545 - RNA, 21 nt, Artificial Sequence
  TRAC-targeting guide sequence portion
cagauuuguugcuccaggcca

SEQ ID NO: 546 - RNA, 21 nt, Artificial Sequence
  TRAC-targeting guide sequence portion
cagcacuguugcucuugaagu

SEQ ID NO: 547 - RNA, 21 nt, Artificial Sequence
  TRAC-targeting guide sequence portion
cagcauuauuccagaagacac

SEQ ID NO: 548 - RNA, 21 nt, Artificial Sequence
  TRAC-targeting guide sequence portion
cagcugagagacucuaaaucc

SEQ ID NO: 549 - RNA, 21 nt, Artificial Sequence
  TRAC-targeting guide sequence portion
cagugacaagucugucugccu

SEQ ID NO: 550 - RNA, 21 nt, Artificial Sequence
  TRAC-targeting guide sequence portion
cagugcuguggccuggagcaa

SEQ ID NO: 551 - RNA, 21 nt, Artificial Sequence
  TRAC-targeting guide sequence portion
cauagaccucaugucuagcac

SEQ ID NO: 552 - RNA, 21 nt, Artificial Sequence
  TRAC-targeting guide sequence portion
caugcaaagucagauuuguug

SEQ ID NO: 553 - RNA, 21 nt, Artificial Sequence
  TRAC-targeting guide sequence portion
caugucuagcacaguuuuguc

SEQ ID NO: 554 - RNA, 21 nt, Artificial Sequence
  TRAC-targeting guide sequence portion
cauuauuccagaagacaccuu

SEQ ID NO: 555 - RNA, 21 nt, Artificial Sequence
  TRAC-targeting guide sequence portion
cauuuguuugagaaucaaaau

SEQ ID NO: 556 - RNA, 21 nt, Artificial Sequence
  TRAC-targeting guide sequence portion
ccacagauauccagaacccug

SEQ ID NO: 557 - RNA, 21 nt, Artificial Sequence
  TRAC-targeting guide sequence portion
ccacagcacuguugcucuuga

SEQ ID NO: 558 - RNA, 21 nt, Artificial Sequence
  TRAC-targeting guide sequence portion
ccagaacccugacccugccgu

SEQ ID NO: 559 - RNA, 21 nt, Artificial Sequence
  TRAC-targeting guide sequence portion
ccagaagacaccuucuucccc

SEQ ID NO: 560 - RNA, 21 nt, Artificial Sequence
  TRAC-targeting guide sequence portion
ccagcugagagacucuaaauc

SEQ ID NO: 561 - RNA, 21 nt, Artificial Sequence
  TRAC-targeting guide sequence portion
ccaggccacagcacuguugcu

SEQ ID NO: 562 - RNA, 21 nt, Artificial Sequence
  TRAC-targeting guide sequence portion
ccagugacaagucugucugcc

SEQ ID NO: 563 - RNA, 21 nt, Artificial Sequence
  TRAC-targeting guide sequence portion
ccauagaccucaugucuagca

SEQ ID NO: 564 - RNA, 21 nt, Artificial Sequence
  TRAC-targeting guide sequence portion
cccacagauauccagaacccu

SEQ ID NO: 565 - RNA, 21 nt, Artificial Sequence
  TRAC-targeting guide sequence portion
cccugacccugccguguacca

SEQ ID NO: 566 - RNA, 21 nt, Artificial Sequence
  TRAC-targeting guide sequence portion
cccugccguguaccagcugag

SEQ ID NO: 567 - RNA, 21 nt, Artificial Sequence
  TRAC-targeting guide sequence portion
cccuuaccugggcuggggaag

SEQ ID NO: 568 - RNA, 21 nt, Artificial Sequence
  TRAC-targeting guide sequence portion
ccgauuuugauucucaaacaa

SEQ ID NO: 569 - RNA, 21 nt, Artificial Sequence
  TRAC-targeting guide sequence portion
ccuauucaccgauuuugauuc

SEQ ID NO: 570 - RNA, 21 nt, Artificial Sequence
  TRAC-targeting guide sequence portion
ccucaugucuagcacaguuuu

SEQ ID NO: 571 - RNA, 21 nt, Artificial Sequence
  TRAC-targeting guide sequence portion
ccugccguguaccagcugaga

SEQ ID NO: 572 - RNA, 21 nt, Artificial Sequence
  TRAC-targeting guide sequence portion
ccuggagcaacaaaucugacu

SEQ ID NO: 573 - RNA, 21 nt, Artificial Sequence
  TRAC-targeting guide sequence portion
ccugggcuggggaagaaggug

SEQ ID NO: 574 - RNA, 21 nt, Artificial Sequence
  TRAC-targeting guide sequence portion
ccuuaccugggcuggggaaga

SEQ ID NO: 575 - RNA, 21 nt, Artificial Sequence
  TRAC-targeting guide sequence portion
ccuuacuuugugacacauuug

SEQ ID NO: 576 - RNA, 21 nt, Artificial Sequence
  TRAC-targeting guide sequence portion
cgauuuugauucucaaacaaa

SEQ ID NO: 577 - RNA, 21 nt, Artificial Sequence
  TRAC-targeting guide sequence portion
cgccuucaacaacagcauuau

SEQ ID NO: 578 - RNA, 21 nt, Artificial Sequence
  TRAC-targeting guide sequence portion
cggcagggucaggguucugga

SEQ ID NO: 579 - RNA, 21 nt, Artificial Sequence
  TRAC-targeting guide sequence portion
cggugaauaggcagacagacu

SEQ ID NO: 580 - RNA, 21 nt, Artificial Sequence
  TRAC-targeting guide sequence portion
cguguaccagcugagagacuc

SEQ ID NO: 581 - RNA, 21 nt, Artificial Sequence
  TRAC-targeting guide sequence portion
cguuugcacaugcaaagucag

SEQ ID NO: 582 - RNA, 21 nt, Artificial Sequence
  TRAC-targeting guide sequence portion
cuaaauccagugacaagucug

SEQ ID NO: 583 - RNA, 21 nt, Artificial Sequence
  TRAC-targeting guide sequence portion
cuagacaugaggucuauggac

SEQ ID NO: 584 - RNA, 21 nt, Artificial Sequence
  TRAC-targeting guide sequence portion
cuagcacaguuuugucuguga

SEQ ID NO: 585 - RNA, 21 nt, Artificial Sequence
  TRAC-targeting guide sequence portion
cuauggacuucaagagcaaca

SEQ ID NO: 586 - RNA, 21 nt, Artificial Sequence
  TRAC-targeting guide sequence portion
cuauucaccgauuuugauucu

SEQ ID NO: 587 - RNA, 21 nt, Artificial Sequence
  TRAC-targeting guide sequence portion
cucaaacaaaugugucacaaa

SEQ ID NO: 588 - RNA, 21 nt, Artificial Sequence
  TRAC-targeting guide sequence portion
cucagcugguacacggcaggg

SEQ ID NO: 589 - RNA, 21 nt, Artificial Sequence
  TRAC-targeting guide sequence portion
cucaugucuagcacaguuuug

SEQ ID NO: 590 - RNA, 21 nt, Artificial Sequence
  TRAC-targeting guide sequence portion
cuccaggccacagcacuguug

SEQ ID NO: 591 - RNA, 21 nt, Artificial Sequence
  TRAC-targeting guide sequence portion
cucuaaauccagugacaaguc

SEQ ID NO: 592 - RNA, 21 nt, Artificial Sequence
  TRAC-targeting guide sequence portion
cucucagcugguacacggcag

SEQ ID NO: 593 - RNA, 21 nt, Artificial Sequence
  TRAC-targeting guide sequence portion
cucuugaaguccauagaccuc

SEQ ID NO: 594 - RNA, 21 nt, Artificial Sequence
  TRAC-targeting guide sequence portion
cugacccugccguguaccagc

SEQ ID NO: 595 - RNA, 21 nt, Artificial Sequence
  TRAC-targeting guide sequence portion
cugacuuugcaugugcaaacg

SEQ ID NO: 596 - RNA, 21 nt, Artificial Sequence
  TRAC-targeting guide sequence portion
cugagagacucuaaauccagu

SEQ ID NO: 597 - RNA, 21 nt, Artificial Sequence
  TRAC-targeting guide sequence portion
cugauguguauaucacagaca

SEQ ID NO: 598 - RNA, 21 nt, Artificial Sequence
  TRAC-targeting guide sequence portion
cugccguguaccagcugagag

SEQ ID NO: 599 - RNA, 21 nt, Artificial Sequence
  TRAC-targeting guide sequence portion
cugccuauucaccgauuuuga

SEQ ID NO: 600 - RNA, 21 nt, Artificial Sequence
  TRAC-targeting guide sequence portion
cuggaauaaugcuguuguuga

SEQ ID NO: 601 - RNA, 21 nt, Artificial Sequence
  TRAC-targeting guide sequence portion
cuggagcaacaaaucugacuu

SEQ ID NO: 602 - RNA, 21 nt, Artificial Sequence
  TRAC-targeting guide sequence portion
cuggauuuagagucucucagc

SEQ ID NO: 603 - RNA, 21 nt, Artificial Sequence
  TRAC-targeting guide sequence portion
cugggcuggggaagaaggugu

SEQ ID NO: 604 - RNA, 21 nt, Artificial Sequence
  TRAC-targeting guide sequence portion
cuggggaagaaggugucuucu

SEQ ID NO: 605 - RNA, 21 nt, Artificial Sequence
  TRAC-targeting guide sequence portion
cugguacacggcagggucagg

SEQ ID NO: 606 - RNA, 21 nt, Artificial Sequence
  TRAC-targeting guide sequence portion
cugucugccuauucaccgauu

SEQ ID NO: 607 - RNA, 21 nt, Artificial Sequence
  TRAC-targeting guide sequence portion
cugugauauacacaucagaau

SEQ ID NO: 608 - RNA, 21 nt, Artificial Sequence
  TRAC-targeting guide sequence portion
cugugcuagacaugaggucua

SEQ ID NO: 609 - RNA, 21 nt, Artificial Sequence
  TRAC-targeting guide sequence portion
cuguggccuggagcaacaaau

SEQ ID NO: 610 - RNA, 21 nt, Artificial Sequence
  TRAC-targeting guide sequence portion
cuguugcucuugaaguccaua

SEQ ID NO: 611 - RNA, 21 nt, Artificial Sequence
  TRAC-targeting guide sequence portion
cuguuguugaaggcguuugca

SEQ ID NO: 612 - RNA, 21 nt, Artificial Sequence
  TRAC-targeting guide sequence portion
cuuaccugggcuggggaagaa

SEQ ID NO: 613 - RNA, 21 nt, Artificial Sequence
  TRAC-targeting guide sequence portion
cuucaacaacagcauuauucc

SEQ ID NO: 614 - RNA, 21 nt, Artificial Sequence
  TRAC-targeting guide sequence portion
cuucaagagcaacagugcugu

SEQ ID NO: 615 - RNA, 21 nt, Artificial Sequence
  TRAC-targeting guide sequence portion
cuucuggaauaaugcuguugu

SEQ ID NO: 616 - RNA, 21 nt, Artificial Sequence
  TRAC-targeting guide sequence portion
cuugaaguccauagaccucau

SEQ ID NO: 617 - RNA, 21 nt, Artificial Sequence
  TRAC-targeting guide sequence portion
cuugucacuggauuuagaguc

SEQ ID NO: 618 - RNA, 21 nt, Artificial Sequence
  TRAC-targeting guide sequence portion
cuuugcaugugcaaacgccuu

SEQ ID NO: 619 - RNA, 21 nt, Artificial Sequence
  TRAC-targeting guide sequence portion
cuuugugacacauuuguuuga

SEQ ID NO: 620 - RNA, 21 nt, Artificial Sequence
  TRAC-targeting guide sequence portion
gaacccugacccugccgugua

SEQ ID NO: 621 - RNA, 21 nt, Artificial Sequence
  TRAC-targeting guide sequence portion
gaagaaggugucuucuggaau

SEQ ID NO: 622 - RNA, 21 nt, Artificial Sequence
  TRAC-targeting guide sequence portion
gaaggcguuugcacaugcaaa

SEQ ID NO: 623 - RNA, 21 nt, Artificial Sequence
  TRAC-targeting guide sequence portion
gaaggugucuucuggaauaau

SEQ ID NO: 624 - RNA, 21 nt, Artificial Sequence
  TRAC-targeting guide sequence portion
gaaguccauagaccucauguc

SEQ ID NO: 625 - RNA, 21 nt, Artificial Sequence
  TRAC-targeting guide sequence portion
gaauaaugcuguuguugaagg

SEQ ID NO: 626 - RNA, 21 nt, Artificial Sequence
  TRAC-targeting guide sequence portion
gaauaggcagacagacuuguc

SEQ ID NO: 627 - RNA, 21 nt, Artificial Sequence
  TRAC-targeting guide sequence portion
gaaucaaaaucggugaauagg

SEQ ID NO: 628 - RNA, 21 nt, Artificial Sequence
  TRAC-targeting guide sequence portion
gaauccuuacuuugugacaca

SEQ ID NO: 629 - RNA, 21 nt, Artificial Sequence
  TRAC-targeting guide sequence portion
gacaagucugucugccuauuc

SEQ ID NO: 630 - RNA, 21 nt, Artificial Sequence
  TRAC-targeting guide sequence portion
gacacauuuguuugagaauca

SEQ ID NO: 631 - RNA, 21 nt, Artificial Sequence
  TRAC-targeting guide sequence portion
gacaccuucuuccccagccca

SEQ ID NO: 632 - RNA, 21 nt, Artificial Sequence
  TRAC-targeting guide sequence portion
gacagacuugucacuggauuu

SEQ ID NO: 633 - RNA, 21 nt, Artificial Sequence
  TRAC-targeting guide sequence portion
gacccugccguguaccagcug

SEQ ID NO: 634 - RNA, 21 nt, Artificial Sequence
  TRAC-targeting guide sequence portion
gaccucaugucuagcacaguu

SEQ ID NO: 635 - RNA, 21 nt, Artificial Sequence
  TRAC-targeting guide sequence portion
gacucuaaauccagugacaag

SEQ ID NO: 636 - RNA, 21 nt, Artificial Sequence
  TRAC-targeting guide sequence portion
gacuucaagagcaacagugcu

SEQ ID NO: 637 - RNA, 21 nt, Artificial Sequence
  TRAC-targeting guide sequence portion
gacuugucacuggauuuagag

SEQ ID NO: 638 - RNA, 21 nt, Artificial Sequence
  TRAC-targeting guide sequence portion
gacuuugcaugugcaaacgcc

SEQ ID NO: 639 - RNA, 21 nt, Artificial Sequence
  TRAC-targeting guide sequence portion
gagaaucaaaaucggugaaua

SEQ ID NO: 640 - RNA, 21 nt, Artificial Sequence
  TRAC-targeting guide sequence portion
gagacucuaaauccagugaca

SEQ ID NO: 641 - RNA, 21 nt, Artificial Sequence
  TRAC-targeting guide sequence portion
gagagacucuaaauccaguga

SEQ ID NO: 642 - RNA, 21 nt, Artificial Sequence
  TRAC-targeting guide sequence portion
gagcaacaaaucugacuuugc

SEQ ID NO: 643 - RNA, 21 nt, Artificial Sequence
  TRAC-targeting guide sequence portion
gagcaacagugcuguggccug

SEQ ID NO: 644 - RNA, 21 nt, Artificial Sequence
  TRAC-targeting guide sequence portion
gaggucuauggacuucaagag

SEQ ID NO: 645 - RNA, 21 nt, Artificial Sequence
  TRAC-targeting guide sequence portion
gauauacacaucagaauccuu

SEQ ID NO: 646 - RNA, 21 nt, Artificial Sequence
  TRAC-targeting guide sequence portion
gauauccagaacccugacccu

SEQ ID NO: 647 - RNA, 21 nt, Artificial Sequence
  TRAC-targeting guide sequence portion
gauguguauaucacagacaaa

SEQ ID NO: 648 - RNA, 21 nt, Artificial Sequence
  TRAC-targeting guide sequence portion
gauucugauguguauaucaca

SEQ ID NO: 649 - RNA, 21 nt, Artificial Sequence
  TRAC-targeting guide sequence portion
gauuuagagucucucagcugg

SEQ ID NO: 650 - RNA, 21 nt, Artificial Sequence
  TRAC-targeting guide sequence portion
gauuuguugcuccaggccaca

SEQ ID NO: 651 - RNA, 21 nt, Artificial Sequence
  TRAC-targeting guide sequence portion
gcaaacgccuucaacaacagc

SEQ ID NO: 652 - RNA, 21 nt, Artificial Sequence
  TRAC-targeting guide sequence portion
gcaaagucagauuuguugcuc

SEQ ID NO: 653 - RNA, 21 nt, Artificial Sequence
  TRAC-targeting guide sequence portion
gcaacaaaucugacuuugcau

SEQ ID NO: 654 - RNA, 21 nt, Artificial Sequence
  TRAC-targeting guide sequence portion
gcaacagugcuguggccugga

SEQ ID NO: 655 - RNA, 21 nt, Artificial Sequence
  TRAC-targeting guide sequence portion
gcacaguuuugucugugauau

SEQ ID NO: 656 - RNA, 21 nt, Artificial Sequence
  TRAC-targeting guide sequence portion
gcacaugcaaagucagauuug

SEQ ID NO: 657 - RNA, 21 nt, Artificial Sequence
  TRAC-targeting guide sequence portion
gcagacagacuugucacugga

SEQ ID NO: 658 - RNA, 21 nt, Artificial Sequence
  TRAC-targeting guide sequence portion
gcagggucaggguucuggaua

SEQ ID NO: 659 - RNA, 21 nt, Artificial Sequence
  TRAC-targeting guide sequence portion
gcaugugcaaacgccuucaac

SEQ ID NO: 660 - RNA, 21 nt, Artificial Sequence
  TRAC-targeting guide sequence portion
gcauuauuccagaagacaccu

SEQ ID NO: 661 - RNA, 21 nt, Artificial Sequence
  TRAC-targeting guide sequence portion
gccacagcacuguugcucuug

SEQ ID NO: 662 - RNA, 21 nt, Artificial Sequence
  TRAC-targeting guide sequence portion
gccguguaccagcugagagac

SEQ ID NO: 663 - RNA, 21 nt, Artificial Sequence
  TRAC-targeting guide sequence portion
gccuauucaccgauuuugauu

SEQ ID NO: 664 - RNA, 21 nt, Artificial Sequence
  TRAC-targeting guide sequence portion
gccuggagcaacaaaucugac

SEQ ID NO: 665 - RNA, 21 nt, Artificial Sequence
  TRAC-targeting guide sequence portion
gccuucaacaacagcauuauu

SEQ ID NO: 666 - RNA, 21 nt, Artificial Sequence
  TRAC-targeting guide sequence portion
gcguuugcacaugcaaaguca

SEQ ID NO: 667 - RNA, 21 nt, Artificial Sequence
  TRAC-targeting guide sequence portion
gcuagacaugaggucuaugga

SEQ ID NO: 668 - RNA, 21 nt, Artificial Sequence
  TRAC-targeting guide sequence portion
gcuccaggccacagcacuguu

SEQ ID NO: 669 - RNA, 21 nt, Artificial Sequence
  TRAC-targeting guide sequence portion
gcucuugaaguccauagaccu

SEQ ID NO: 670 - RNA, 21 nt, Artificial Sequence
  TRAC-targeting guide sequence portion
gcugagagacucuaaauccag

SEQ ID NO: 671 - RNA, 21 nt, Artificial Sequence
  TRAC-targeting guide sequence portion
gcugguacacggcagggucag

SEQ ID NO: 672 - RNA, 21 nt, Artificial Sequence
  TRAC-targeting guide sequence portion
gcuguggccuggagcaacaaa

SEQ ID NO: 673 - RNA, 21 nt, Artificial Sequence
  TRAC-targeting guide sequence portion
gcuguuguugaaggcguuugc

SEQ ID NO: 674 - RNA, 21 nt, Artificial Sequence
  TRAC-targeting guide sequence portion
ggaagaaggugucuucuggaa

SEQ ID NO: 675 - RNA, 21 nt, Artificial Sequence
  TRAC-targeting guide sequence portion
ggaauaaugcuguuguugaag

SEQ ID NO: 676 - RNA, 21 nt, Artificial Sequence
  TRAC-targeting guide sequence portion
ggagcaacaaaucugacuuug

SEQ ID NO: 677 - RNA, 21 nt, Artificial Sequence
  TRAC-targeting guide sequence portion
ggauucugauguguauaucac

SEQ ID NO: 678 - RNA, 21 nt, Artificial Sequence
  TRAC-targeting guide sequence portion
ggcagacagacuugucacugg

SEQ ID NO: 679 - RNA, 21 nt, Artificial Sequence
  TRAC-targeting guide sequence portion
ggccacagcacuguugcucuu

SEQ ID NO: 680 - RNA, 21 nt, Artificial Sequence
  TRAC-targeting guide sequence portion
ggccuggagcaacaaaucuga

SEQ ID NO: 681 - RNA, 21 nt, Artificial Sequence
  TRAC-targeting guide sequence portion
ggcguuugcacaugcaaaguc

SEQ ID NO: 682 - RNA, 21 nt, Artificial Sequence
  TRAC-targeting guide sequence portion
gggaagaaggugucuucugga

SEQ ID NO: 683 - RNA, 21 nt, Artificial Sequence
  TRAC-targeting guide sequence portion
gggcuggggaagaaggugucu

SEQ ID NO: 684 - RNA, 21 nt, Artificial Sequence
  TRAC-targeting guide sequence portion
ggggaagaaggugucuucugg

SEQ ID NO: 685 - RNA, 21 nt, Artificial Sequence
  TRAC-targeting guide sequence portion
gguacacggcagggucagggu

SEQ ID NO: 686 - RNA, 21 nt, Artificial Sequence
  TRAC-targeting guide sequence portion
ggucuauggacuucaagagca

SEQ ID NO: 687 - RNA, 21 nt, Artificial Sequence
  TRAC-targeting guide sequence portion
ggugucuucuggaauaaugcu

SEQ ID NO: 688 - RNA, 21 nt, Artificial Sequence
  TRAC-targeting guide sequence portion
guaaggauucugauguguaua

SEQ ID NO: 689 - RNA, 21 nt, Artificial Sequence
  TRAC-targeting guide sequence portion
guaccagcugagagacucuaa

SEQ ID NO: 690 - RNA, 21 nt, Artificial Sequence
  TRAC-targeting guide sequence portion
guauaucacagacaaaacugu

SEQ ID NO: 691 - RNA, 21 nt, Artificial Sequence
  TRAC-targeting guide sequence portion
gucacaaaguaaggauucuga

SEQ ID NO: 692 - RNA, 21 nt, Artificial Sequence
  TRAC-targeting guide sequence portion
gucacuggauuuagagucucu

SEQ ID NO: 693 - RNA, 21 nt, Artificial Sequence
  TRAC-targeting guide sequence portion
guccauagaccucaugucuag

SEQ ID NO: 694 - RNA, 21 nt, Artificial Sequence
  TRAC-targeting guide sequence portion
gucuagcacaguuuugucugu

SEQ ID NO: 695 - RNA, 21 nt, Artificial Sequence
  TRAC-targeting guide sequence portion
gucuauggacuucaagagcaa

SEQ ID NO: 696 - RNA, 21 nt, Artificial Sequence
  TRAC-targeting guide sequence portion
gucucucagcugguacacggc

SEQ ID NO: 697 - RNA, 21 nt, Artificial Sequence
  TRAC-targeting guide sequence portion
gucugccuauucaccgauuuu

SEQ ID NO: 698 - RNA, 21 nt, Artificial Sequence
  TRAC-targeting guide sequence portion
gucugucugccuauucaccga

SEQ ID NO: 699 - RNA, 21 nt, Artificial Sequence
  TRAC-targeting guide sequence portion
gucuucuggaauaaugcuguu

SEQ ID NO: 700 - RNA, 21 nt, Artificial Sequence
  TRAC-targeting guide sequence portion
gugaauaggcagacagacuug

SEQ ID NO: 701 - RNA, 21 nt, Artificial Sequence
  TRAC-targeting guide sequence portion
gugacaagucugucugccuau

SEQ ID NO: 702 - RNA, 21 nt, Artificial Sequence
  TRAC-targeting guide sequence portion
gugauauacacaucagaaucc

SEQ ID NO: 703 - RNA, 21 nt, Artificial Sequence
  TRAC-targeting guide sequence portion
gugcuagacaugaggucuaug

SEQ ID NO: 704 - RNA, 21 nt, Artificial Sequence
  TRAC-targeting guide sequence portion
gugcuguggccuggagcaaca

SEQ ID NO: 705 - RNA, 21 nt, Artificial Sequence
  TRAC-targeting guide sequence portion
guggccuggagcaacaaaucu

SEQ ID NO: 706 - RNA, 21 nt, Artificial Sequence
  TRAC-targeting guide sequence portion
guguaccagcugagagacucu

SEQ ID NO: 707 - RNA, 21 nt, Artificial Sequence
  TRAC-targeting guide sequence portion
guguauaucacagacaaaacu

SEQ ID NO: 708 - RNA, 21 nt, Artificial Sequence
  TRAC-targeting guide sequence portion
gugucacaaaguaaggauucu

SEQ ID NO: 709 - RNA, 21 nt, Artificial Sequence
  TRAC-targeting guide sequence portion
gugucuucuggaauaaugcug

SEQ ID NO: 710 - RNA, 21 nt, Artificial Sequence
  TRAC-targeting guide sequence portion
guugcuccaggccacagcacu

SEQ ID NO: 711 - RNA, 21 nt, Artificial Sequence
  TRAC-targeting guide sequence portion
guugcucuugaaguccauaga

SEQ ID NO: 712 - RNA, 21 nt, Artificial Sequence
  TRAC-targeting guide sequence portion
guuguugaaggcguuugcaca

SEQ ID NO: 713 - RNA, 21 nt, Artificial Sequence
  TRAC-targeting guide sequence portion
guuugagaaucaaaaucggug

SEQ ID NO: 714 - RNA, 21 nt, Artificial Sequence
  TRAC-targeting guide sequence portion
guuugcacaugcaaagucaga

SEQ ID NO: 715 - RNA, 21 nt, Artificial Sequence
  TRAC-targeting guide sequence portion
guuuugucugugauauacaca

SEQ ID NO: 716 - RNA, 21 nt, Artificial Sequence
  TRAC-targeting guide sequence portion
uaaauccagugacaagucugu

SEQ ID NO: 717 - RNA, 21 nt, Artificial Sequence
  TRAC-targeting guide sequence portion
uaaggauucugauguguauau

SEQ ID NO: 718 - RNA, 21 nt, Artificial Sequence
  TRAC-targeting guide sequence portion
uaaugcuguuguugaaggcgu

SEQ ID NO: 719 - RNA, 21 nt, Artificial Sequence
  TRAC-targeting guide sequence portion
uacacggcagggucaggguuc

SEQ ID NO: 720 - RNA, 21 nt, Artificial Sequence
  TRAC-targeting guide sequence portion
uaccagcugagagacucuaaa

SEQ ID NO: 721 - RNA, 21 nt, Artificial Sequence
  TRAC-targeting guide sequence portion
uaccugggcuggggaagaagg

SEQ ID NO: 722 - RNA, 21 nt, Artificial Sequence
  TRAC-targeting guide sequence portion
uagacaugaggucuauggacu

SEQ ID NO: 723 - RNA, 21 nt, Artificial Sequence
  TRAC-targeting guide sequence portion
uagaccucaugucuagcacag

SEQ ID NO: 724 - RNA, 21 nt, Artificial Sequence
  TRAC-targeting guide sequence portion
uagagucucucagcugguaca

SEQ ID NO: 725 - RNA, 21 nt, Artificial Sequence
  TRAC-targeting guide sequence portion
uagcacaguuuugucugugau

SEQ ID NO: 726 - RNA, 21 nt, Artificial Sequence
  TRAC-targeting guide sequence portion
uauacacaucagaauccuuac

SEQ ID NO: 727 - RNA, 21 nt, Artificial Sequence
  TRAC-targeting guide sequence portion
uauaucacagacaaaacugug

SEQ ID NO: 728 - RNA, 21 nt, Artificial Sequence
  TRAC-targeting guide sequence portion
uaucacagacaaaacugugcu

SEQ ID NO: 729 - RNA, 21 nt, Artificial Sequence
  TRAC-targeting guide sequence portion
uauccagaacccugacccugc

SEQ ID NO: 730 - RNA, 21 nt, Artificial Sequence
  TRAC-targeting guide sequence portion
uauggacuucaagagcaacag

SEQ ID NO: 731 - RNA, 21 nt, Artificial Sequence
  TRAC-targeting guide sequence portion
uauuccagaagacaccuucuu

SEQ ID NO: 732 - RNA, 21 nt, Artificial Sequence
  TRAC-targeting guide sequence portion
ucaaaaucggugaauaggcag

SEQ ID NO: 733 - RNA, 21 nt, Artificial Sequence
  TRAC-targeting guide sequence portion
ucaaacaaaugugucacaaag

SEQ ID NO: 734 - RNA, 21 nt, Artificial Sequence
  TRAC-targeting guide sequence portion
ucaacaacagcauuauuccag

SEQ ID NO: 735 - RNA, 21 nt, Artificial Sequence
  TRAC-targeting guide sequence portion
ucaagagcaacagugcugugg

SEQ ID NO: 736 - RNA, 21 nt, Artificial Sequence
  TRAC-targeting guide sequence portion
ucacaaaguaaggauucugau

SEQ ID NO: 737 - RNA, 21 nt, Artificial Sequence
  TRAC-targeting guide sequence portion
ucacagacaaaacugugcuag

SEQ ID NO: 738 - RNA, 21 nt, Artificial Sequence
  TRAC-targeting guide sequence portion
ucaccgauuuugauucucaaa

SEQ ID NO: 739 - RNA, 21 nt, Artificial Sequence
  TRAC-targeting guide sequence portion
ucacuggauuuagagucucuc

SEQ ID NO: 740 - RNA, 21 nt, Artificial Sequence
  TRAC-targeting guide sequence portion
ucagaauccuuacuuugugac

SEQ ID NO: 741 - RNA, 21 nt, Artificial Sequence
  TRAC-targeting guide sequence portion
ucagauuuguugcuccaggcc

SEQ ID NO: 742 - RNA, 21 nt, Artificial Sequence
  TRAC-targeting guide sequence portion
ucaugucuagcacaguuuugu

SEQ ID NO: 743 - RNA, 21 nt, Artificial Sequence
  TRAC-targeting guide sequence portion
uccagaacccugacccugccg

SEQ ID NO: 744 - RNA, 21 nt, Artificial Sequence
  TRAC-targeting guide sequence portion
uccagaagacaccuucuuccc

SEQ ID NO: 745 - RNA, 21 nt, Artificial Sequence
  TRAC-targeting guide sequence portion
uccaggccacagcacuguugc

SEQ ID NO: 746 - RNA, 21 nt, Artificial Sequence
  TRAC-targeting guide sequence portion
uccagugacaagucugucugc

SEQ ID NO: 747 - RNA, 21 nt, Artificial Sequence
  TRAC-targeting guide sequence portion
uccauagaccucaugucuagc

SEQ ID NO: 748 - RNA, 21 nt, Artificial Sequence
  TRAC-targeting guide sequence portion
uccuuacuuugugacacauuu

SEQ ID NO: 749 - RNA, 21 nt, Artificial Sequence
  TRAC-targeting guide sequence portion
ucggugaauaggcagacagac

SEQ ID NO: 750 - RNA, 21 nt, Artificial Sequence
  TRAC-targeting guide sequence portion
ucuaaauccagugacaagucu

SEQ ID NO: 751 - RNA, 21 nt, Artificial Sequence
  TRAC-targeting guide sequence portion
ucuagcacaguuuugucugug

SEQ ID NO: 752 - RNA, 21 nt, Artificial Sequence
  TRAC-targeting guide sequence portion
ucuauggacuucaagagcaac

SEQ ID NO: 753 - RNA, 21 nt, Artificial Sequence
  TRAC-targeting guide sequence portion
ucucaaacaaaugugucacaa

SEQ ID NO: 754 - RNA, 21 nt, Artificial Sequence
  TRAC-targeting guide sequence portion
ucucagcugguacacggcagg

SEQ ID NO: 755 - RNA, 21 nt, Artificial Sequence
  TRAC-targeting guide sequence portion
ucugacuuugcaugugcaaac

SEQ ID NO: 756 - RNA, 21 nt, Artificial Sequence
  TRAC-targeting guide sequence portion
ucugauguguauaucacagac

SEQ ID NO: 757 - RNA, 21 nt, Artificial Sequence
  TRAC-targeting guide sequence portion
ucuggaauaaugcuguuguug

SEQ ID NO: 758 - RNA, 21 nt, Artificial Sequence
  TRAC-targeting guide sequence portion
ucugucugccuauucaccgau

SEQ ID NO: 759 - RNA, 21 nt, Artificial Sequence
  TRAC-targeting guide sequence portion
ucuugaaguccauagaccuca

SEQ ID NO: 760 - RNA, 21 nt, Artificial Sequence
  TRAC-targeting guide sequence portion
ugaaggcguuugcacaugcaa

SEQ ID NO: 761 - RNA, 21 nt, Artificial Sequence
  TRAC-targeting guide sequence portion
ugaaguccauagaccucaugu

SEQ ID NO: 762 - RNA, 21 nt, Artificial Sequence
  TRAC-targeting guide sequence portion
ugaauaggcagacagacuugu

SEQ ID NO: 763 - RNA, 21 nt, Artificial Sequence
  TRAC-targeting guide sequence portion
ugacaagucugucugccuauu

SEQ ID NO: 764 - RNA, 21 nt, Artificial Sequence
  TRAC-targeting guide sequence portion
ugacuuugcaugugcaaacgc

SEQ ID NO: 765 - RNA, 21 nt, Artificial Sequence
  TRAC-targeting guide sequence portion
ugagaaucaaaaucggugaau

SEQ ID NO: 766 - RNA, 21 nt, Artificial Sequence
  TRAC-targeting guide sequence portion
ugagagacucuaaauccagug

SEQ ID NO: 767 - RNA, 21 nt, Artificial Sequence
  TRAC-targeting guide sequence portion
ugaggucuauggacuucaaga

SEQ ID NO: 768 - RNA, 21 nt, Artificial Sequence
  TRAC-targeting guide sequence portion
ugauguguauaucacagacaa

SEQ ID NO: 769 - RNA, 21 nt, Artificial Sequence
  TRAC-targeting guide sequence portion
ugauucucaaacaaauguguc

SEQ ID NO: 770 - RNA, 21 nt, Artificial Sequence
  TRAC-targeting guide sequence portion
ugcaaacgccuucaacaacag

SEQ ID NO: 771 - RNA, 21 nt, Artificial Sequence
  TRAC-targeting guide sequence portion
ugcaaagucagauuuguugcu

SEQ ID NO: 772 - RNA, 21 nt, Artificial Sequence
  TRAC-targeting guide sequence portion
ugcacaugcaaagucagauuu

SEQ ID NO: 773 - RNA, 21 nt, Artificial Sequence
  TRAC-targeting guide sequence portion
ugcaugugcaaacgccuucaa

SEQ ID NO: 774 - RNA, 21 nt, Artificial Sequence
  TRAC-targeting guide sequence portion
ugccguguaccagcugagaga

SEQ ID NO: 775 - RNA, 21 nt, Artificial Sequence
  TRAC-targeting guide sequence portion
ugccuauucaccgauuuugau

SEQ ID NO: 776 - RNA, 21 nt, Artificial Sequence
  TRAC-targeting guide sequence portion
ugcuagacaugaggucuaugg

SEQ ID NO: 777 - RNA, 21 nt, Artificial Sequence
  TRAC-targeting guide sequence portion
ugcuccaggccacagcacugu

SEQ ID NO: 778 - RNA, 21 nt, Artificial Sequence
  TRAC-targeting guide sequence portion
ugcucuugaaguccauagacc

SEQ ID NO: 779 - RNA, 21 nt, Artificial Sequence
  TRAC-targeting guide sequence portion
ugcuguggccuggagcaacaa

SEQ ID NO: 780 - RNA, 21 nt, Artificial Sequence
  TRAC-targeting guide sequence portion
ugcuguuguugaaggcguuug

SEQ ID NO: 781 - RNA, 21 nt, Artificial Sequence
  TRAC-targeting guide sequence portion
uggaauaaugcuguuguugaa

SEQ ID NO: 782 - RNA, 21 nt, Artificial Sequence
  TRAC-targeting guide sequence portion
uggacuucaagagcaacagug

SEQ ID NO: 783 - RNA, 21 nt, Artificial Sequence
  TRAC-targeting guide sequence portion
uggagcaacaaaucugacuuu

SEQ ID NO: 784 - RNA, 21 nt, Artificial Sequence
  TRAC-targeting guide sequence portion
uggauuuagagucucucagcu

SEQ ID NO: 785 - RNA, 21 nt, Artificial Sequence
  TRAC-targeting guide sequence portion
uggccuggagcaacaaaucug

SEQ ID NO: 786 - RNA, 21 nt, Artificial Sequence
  TRAC-targeting guide sequence portion
ugggcuggggaagaagguguc

SEQ ID NO: 787 - RNA, 21 nt, Artificial Sequence
  TRAC-targeting guide sequence portion
uggggaagaaggugucuucug

SEQ ID NO: 788 - RNA, 21 nt, Artificial Sequence
  TRAC-targeting guide sequence portion
ugguacacggcagggucaggg

SEQ ID NO: 789 - RNA, 21 nt, Artificial Sequence
  TRAC-targeting guide sequence portion
uguauaucacagacaaaacug

SEQ ID NO: 790 - RNA, 21 nt, Artificial Sequence
  TRAC-targeting guide sequence portion
ugucacaaaguaaggauucug

SEQ ID NO: 791 - RNA, 21 nt, Artificial Sequence
  TRAC-targeting guide sequence portion
ugucacuggauuuagagucuc

SEQ ID NO: 792 - RNA, 21 nt, Artificial Sequence
  TRAC-targeting guide sequence portion
ugucuagcacaguuuugucug

SEQ ID NO: 793 - RNA, 21 nt, Artificial Sequence
  TRAC-targeting guide sequence portion
ugucugccuauucaccgauuu

SEQ ID NO: 794 - RNA, 21 nt, Artificial Sequence
  TRAC-targeting guide sequence portion
ugucugugauauacacaucag

SEQ ID NO: 795 - RNA, 21 nt, Artificial Sequence
  TRAC-targeting guide sequence portion
ugucuucuggaauaaugcugu

SEQ ID NO: 796 - RNA, 21 nt, Artificial Sequence
  TRAC-targeting guide sequence portion
ugugauauacacaucagaauc

SEQ ID NO: 797 - RNA, 21 nt, Artificial Sequence
  TRAC-targeting guide sequence portion
ugugcaaacgccuucaacaac

SEQ ID NO: 798 - RNA, 21 nt, Artificial Sequence
  TRAC-targeting guide sequence portion
ugugcuagacaugaggucuau

SEQ ID NO: 799 - RNA, 21 nt, Artificial Sequence
  TRAC-targeting guide sequence portion
uguggccuggagcaacaaauc

SEQ ID NO: 800 - RNA, 21 nt, Artificial Sequence
  TRAC-targeting guide sequence portion
uguguauaucacagacaaaac

SEQ ID NO: 801 - RNA, 21 nt, Artificial Sequence
  TRAC-targeting guide sequence portion
ugugucacaaaguaaggauuc

SEQ ID NO: 802 - RNA, 21 nt, Artificial Sequence
  TRAC-targeting guide sequence portion
uguugaaggcguuugcacaug

SEQ ID NO: 803 - RNA, 21 nt, Artificial Sequence
  TRAC-targeting guide sequence portion
uguugcuccaggccacagcac

SEQ ID NO: 804 - RNA, 21 nt, Artificial Sequence
  TRAC-targeting guide sequence portion
uguuguugaaggcguuugcac

SEQ ID NO: 805 - RNA, 21 nt, Artificial Sequence
  TRAC-targeting guide sequence portion
uguuugagaaucaaaaucggu

SEQ ID NO: 806 - RNA, 21 nt, Artificial Sequence
  TRAC-targeting guide sequence portion
uuaccugggcuggggaagaag

SEQ ID NO: 807 - RNA, 21 nt, Artificial Sequence
  TRAC-targeting guide sequence portion
uuagagucucucagcugguac

SEQ ID NO: 808 - RNA, 21 nt, Artificial Sequence
  TRAC-targeting guide sequence portion
uuauuccagaagacaccuucu

SEQ ID NO: 809 - RNA, 21 nt, Artificial Sequence
  TRAC-targeting guide sequence portion
uucaacaacagcauuauucca

SEQ ID NO: 810 - RNA, 21 nt, Artificial Sequence
  TRAC-targeting guide sequence portion
uucaagagcaacagugcugug

SEQ ID NO: 811 - RNA, 21 nt, Artificial Sequence
  TRAC-targeting guide sequence portion
uuccagaagacaccuucuucc

SEQ ID NO: 812 - RNA, 21 nt, Artificial Sequence
  TRAC-targeting guide sequence portion
uucugauguguauaucacaga

SEQ ID NO: 813 - RNA, 21 nt, Artificial Sequence
  TRAC-targeting guide sequence portion
uucuggaauaaugcuguuguu

SEQ ID NO: 814 - RNA, 21 nt, Artificial Sequence
  TRAC-targeting guide sequence portion
uugaaguccauagaccucaug

SEQ ID NO: 815 - RNA, 21 nt, Artificial Sequence
  TRAC-targeting guide sequence portion
uugagaaucaaaaucggugaa

SEQ ID NO: 816 - RNA, 21 nt, Artificial Sequence
  TRAC-targeting guide sequence portion
uugcacaugcaaagucagauu

SEQ ID NO: 817 - RNA, 21 nt, Artificial Sequence
  TRAC-targeting guide sequence portion
uugcaugugcaaacgccuuca

SEQ ID NO: 818 - RNA, 21 nt, Artificial Sequence
  TRAC-targeting guide sequence portion
uugcucuugaaguccauagac

SEQ ID NO: 819 - RNA, 21 nt, Artificial Sequence
  TRAC-targeting guide sequence portion
uugucacuggauuuagagucu

SEQ ID NO: 820 - RNA, 21 nt, Artificial Sequence
  TRAC-targeting guide sequence portion
uugucugugauauacacauca

SEQ ID NO: 821 - RNA, 21 nt, Artificial Sequence
  TRAC-targeting guide sequence portion
uuguugaaggcguuugcacau

SEQ ID NO: 822 - RNA, 21 nt, Artificial Sequence
  TRAC-targeting guide sequence portion
uuguugcuccaggccacagca

SEQ ID NO: 823 - RNA, 21 nt, Artificial Sequence
  TRAC-targeting guide sequence portion
uuuagagucucucagcuggua

SEQ ID NO: 824 - RNA, 21 nt, Artificial Sequence
  TRAC-targeting guide sequence portion
uuugcacaugcaaagucagau

SEQ ID NO: 825 - RNA, 21 nt, Artificial Sequence
  TRAC-targeting guide sequence portion
uuugcaugugcaaacgccuuc

SEQ ID NO: 826 - RNA, 21 nt, Artificial Sequence
  TRAC-targeting guide sequence portion
uuugucugugauauacacauc

SEQ ID NO: 827 - RNA, 21 nt, Artificial Sequence
  TRAC-targeting guide sequence portion
uuuguugcuccaggccacagc

SEQ ID NO: 828 - RNA, 22 nt, Artificial Sequence
  TRAC-targeting guide sequence portion
aaaacugugcuagacaugaggu

SEQ ID NO: 829 - RNA, 22 nt, Artificial Sequence
  TRAC-targeting guide sequence portion
aaaaucggugaauaggcagaca

SEQ ID NO: 830 - RNA, 22 nt, Artificial Sequence
  TRAC-targeting guide sequence portion
aaacaaaugugucacaaaguaa

SEQ ID NO: 831 - RNA, 22 nt, Artificial Sequence
  TRAC-targeting guide sequence portion
aaacgccuucaacaacagcauu

SEQ ID NO: 832 - RNA, 22 nt, Artificial Sequence
  TRAC-targeting guide sequence portion
aaacugugcuagacaugagguc

SEQ ID NO: 833 - RNA, 22 nt, Artificial Sequence
  TRAC-targeting guide sequence portion
aaaguaaggauucugaugugua

SEQ ID NO: 834 - RNA, 22 nt, Artificial Sequence
  TRAC-targeting guide sequence portion
aaagucagauuuguugcuccag

SEQ ID NO: 835 - RNA, 22 nt, Artificial Sequence
  TRAC-targeting guide sequence portion
aaauccagugacaagucugucu

SEQ ID NO: 836 - RNA, 22 nt, Artificial Sequence
  TRAC-targeting guide sequence portion
aaaucggugaauaggcagacag

SEQ ID NO: 837 - RNA, 22 nt, Artificial Sequence
  TRAC-targeting guide sequence portion
aaaucugacuuugcaugugcaa

SEQ ID NO: 838 - RNA, 22 nt, Artificial Sequence
  TRAC-targeting guide sequence portion
aaaugugucacaaaguaaggau

SEQ ID NO: 839 - RNA, 22 nt, Artificial Sequence
  TRAC-targeting guide sequence portion
aacaaaucugacuuugcaugug

SEQ ID NO: 840 - RNA, 22 nt, Artificial Sequence
  TRAC-targeting guide sequence portion
aacaaaugugucacaaaguaag

SEQ ID NO: 841 - RNA, 22 nt, Artificial Sequence
  TRAC-targeting guide sequence portion
aacaacagcauuauuccagaag

SEQ ID NO: 842 - RNA, 22 nt, Artificial Sequence
  TRAC-targeting guide sequence portion
aacagcauuauuccagaagaca

SEQ ID NO: 843 - RNA, 22 nt, Artificial Sequence
  TRAC-targeting guide sequence portion
aacagugcuguggccuggagca

SEQ ID NO: 844 - RNA, 22 nt, Artificial Sequence
  TRAC-targeting guide sequence portion
aacccugacccugccguguacc

SEQ ID NO: 845 - RNA, 22 nt, Artificial Sequence
  TRAC-targeting guide sequence portion
aacgccuucaacaacagcauua

SEQ ID NO: 846 - RNA, 22 nt, Artificial Sequence
  TRAC-targeting guide sequence portion
aagaaggugucuucuggaauaa

SEQ ID NO: 847 - RNA, 22 nt, Artificial Sequence
  TRAC-targeting guide sequence portion
aagacaccuucuuccccagccc

SEQ ID NO: 848 - RNA, 22 nt, Artificial Sequence
  TRAC-targeting guide sequence portion
aagagcaacagugcuguggccu

SEQ ID NO: 849 - RNA, 22 nt, Artificial Sequence
  TRAC-targeting guide sequence portion
aaggauucugauguguauauca

SEQ ID NO: 850 - RNA, 22 nt, Artificial Sequence
  TRAC-targeting guide sequence portion
aaggcguuugcacaugcaaagu

SEQ ID NO: 851 - RNA, 22 nt, Artificial Sequence
  TRAC-targeting guide sequence portion
aaggugucuucuggaauaaugc

SEQ ID NO: 852 - RNA, 22 nt, Artificial Sequence
  TRAC-targeting guide sequence portion
aaguaaggauucugauguguau

SEQ ID NO: 853 - RNA, 22 nt, Artificial Sequence
  TRAC-targeting guide sequence portion
aagucagauuuguugcuccagg

SEQ ID NO: 854 - RNA, 22 nt, Artificial Sequence
  TRAC-targeting guide sequence portion
aaguccauagaccucaugucua

SEQ ID NO: 855 - RNA, 22 nt, Artificial Sequence
  TRAC-targeting guide sequence portion
aagucugucugccuauucaccg

SEQ ID NO: 856 - RNA, 22 nt, Artificial Sequence
  TRAC-targeting guide sequence portion
aauaaugcuguuguugaaggcg

SEQ ID NO: 857 - RNA, 22 nt, Artificial Sequence
  TRAC-targeting guide sequence portion
aauaggcagacagacuugucac

SEQ ID NO: 858 - RNA, 22 nt, Artificial Sequence
  TRAC-targeting guide sequence portion
aaucaaaaucggugaauaggca

SEQ ID NO: 859 - RNA, 22 nt, Artificial Sequence
  TRAC-targeting guide sequence portion
aauccagugacaagucugucug

SEQ ID NO: 860 - RNA, 22 nt, Artificial Sequence
  TRAC-targeting guide sequence portion
aauccuuacuuugugacacauu

SEQ ID NO: 861 - RNA, 22 nt, Artificial Sequence
  TRAC-targeting guide sequence portion
aaucggugaauaggcagacaga

SEQ ID NO: 862 - RNA, 22 nt, Artificial Sequence
  TRAC-targeting guide sequence portion
aaucugacuuugcaugugcaaa

SEQ ID NO: 863 - RNA, 22 nt, Artificial Sequence
  TRAC-targeting guide sequence portion
aaugcuguuguugaaggcguuu

SEQ ID NO: 864 - RNA, 22 nt, Artificial Sequence
  TRAC-targeting guide sequence portion
aaugugucacaaaguaaggauu

SEQ ID NO: 865 - RNA, 22 nt, Artificial Sequence
  TRAC-targeting guide sequence portion
acaaaacugugcuagacaugag

SEQ ID NO: 866 - RNA, 22 nt, Artificial Sequence
  TRAC-targeting guide sequence portion
acaaaguaaggauucugaugug

SEQ ID NO: 867 - RNA, 22 nt, Artificial Sequence
  TRAC-targeting guide sequence portion
acaaaucugacuuugcaugugc

SEQ ID NO: 868 - RNA, 22 nt, Artificial Sequence
  TRAC-targeting guide sequence portion
acaacagcauuauuccagaaga

SEQ ID NO: 869 - RNA, 22 nt, Artificial Sequence
  TRAC-targeting guide sequence portion
acaagucugucugccuauucac

SEQ ID NO: 870 - RNA, 22 nt, Artificial Sequence
  TRAC-targeting guide sequence portion
acacaucagaauccuuacuuug

SEQ ID NO: 871 - RNA, 22 nt, Artificial Sequence
  TRAC-targeting guide sequence portion
acacauuuguuugagaaucaaa

SEQ ID NO: 872 - RNA, 22 nt, Artificial Sequence
  TRAC-targeting guide sequence portion
acaccuucuuccccagcccagg

SEQ ID NO: 873 - RNA, 22 nt, Artificial Sequence
  TRAC-targeting guide sequence portion
acacggcagggucaggguucug

SEQ ID NO: 874 - RNA, 22 nt, Artificial Sequence
  TRAC-targeting guide sequence portion
acagacaaaacugugcuagaca

SEQ ID NO: 875 - RNA, 22 nt, Artificial Sequence
  TRAC-targeting guide sequence portion
acagacuugucacuggauuuag

SEQ ID NO: 876 - RNA, 22 nt, Artificial Sequence
  TRAC-targeting guide sequence portion
acagauauccagaacccugacc

SEQ ID NO: 877 - RNA, 22 nt, Artificial Sequence
  TRAC-targeting guide sequence portion
acagcacuguugcucuugaagu

SEQ ID NO: 878 - RNA, 22 nt, Artificial Sequence
  TRAC-targeting guide sequence portion
acagcauuauuccagaagacac

SEQ ID NO: 879 - RNA, 22 nt, Artificial Sequence
  TRAC-targeting guide sequence portion
acagugcuguggccuggagcaa

SEQ ID NO: 880 - RNA, 22 nt, Artificial Sequence
  TRAC-targeting guide sequence portion
acaguuuugucugugauauaca

SEQ ID NO: 881 - RNA, 22 nt, Artificial Sequence
  TRAC-targeting guide sequence portion
acaucagaauccuuacuuugug

SEQ ID NO: 882 - RNA, 22 nt, Artificial Sequence
  TRAC-targeting guide sequence portion
acaugaggucuauggacuucaa

SEQ ID NO: 883 - RNA, 22 nt, Artificial Sequence
  TRAC-targeting guide sequence portion
acaugcaaagucagauuuguug

SEQ ID NO: 884 - RNA, 22 nt, Artificial Sequence
  TRAC-targeting guide sequence portion
acauuuguuugagaaucaaaau

SEQ ID NO: 885 - RNA, 22 nt, Artificial Sequence
  TRAC-targeting guide sequence portion
accagcugagagacucuaaauc

SEQ ID NO: 886 - RNA, 22 nt, Artificial Sequence
  TRAC-targeting guide sequence portion
acccugacccugccguguacca

SEQ ID NO: 887 - RNA, 22 nt, Artificial Sequence
  TRAC-targeting guide sequence portion
acccugccguguaccagcugag

SEQ ID NO: 888 - RNA, 22 nt, Artificial Sequence
  TRAC-targeting guide sequence portion
accgauuuugauucucaaacaa

SEQ ID NO: 889 - RNA, 22 nt, Artificial Sequence
  TRAC-targeting guide sequence portion
accucaugucuagcacaguuuu

SEQ ID NO: 890 - RNA, 22 nt, Artificial Sequence
  TRAC-targeting guide sequence portion
accugggcuggggaagaaggug

SEQ ID NO: 891 - RNA, 22 nt, Artificial Sequence
  TRAC-targeting guide sequence portion
acgccuucaacaacagcauuau

SEQ ID NO: 892 - RNA, 22 nt, Artificial Sequence
  TRAC-targeting guide sequence portion
acggcagggucaggguucugga

SEQ ID NO: 893 - RNA, 22 nt, Artificial Sequence
  TRAC-targeting guide sequence portion
acucuaaauccagugacaaguc

SEQ ID NO: 894 - RNA, 22 nt, Artificial Sequence
  TRAC-targeting guide sequence portion
acuggauuuagagucucucagc

SEQ ID NO: 895 - RNA, 22 nt, Artificial Sequence
  TRAC-targeting guide sequence portion
acugugcuagacaugaggucua

SEQ ID NO: 896 - RNA, 22 nt, Artificial Sequence
  TRAC-targeting guide sequence portion
acuguugcucuugaaguccaua

SEQ ID NO: 897 - RNA, 22 nt, Artificial Sequence
  TRAC-targeting guide sequence portion
acuucaagagcaacagugcugu

SEQ ID NO: 898 - RNA, 22 nt, Artificial Sequence
  TRAC-targeting guide sequence portion
acuugucacuggauuuagaguc

SEQ ID NO: 899 - RNA, 22 nt, Artificial Sequence
  TRAC-targeting guide sequence portion
acuuugcaugugcaaacgccuu

SEQ ID NO: 900 - RNA, 22 nt, Artificial Sequence
  TRAC-targeting guide sequence portion
acuuugugacacauuuguuuga

SEQ ID NO: 901 - RNA, 22 nt, Artificial Sequence
  TRAC-targeting guide sequence portion
agaacccugacccugccgugua

SEQ ID NO: 902 - RNA, 22 nt, Artificial Sequence
  TRAC-targeting guide sequence portion
agaagacaccuucuuccccagc

SEQ ID NO: 903 - RNA, 22 nt, Artificial Sequence
  TRAC-targeting guide sequence portion
agaaggugucuucuggaauaau

SEQ ID NO: 904 - RNA, 22 nt, Artificial Sequence
  TRAC-targeting guide sequence portion
agaauccuuacuuugugacaca

SEQ ID NO: 905 - RNA, 22 nt, Artificial Sequence
  TRAC-targeting guide sequence portion
agacaaaacugugcuagacaug

SEQ ID NO: 906 - RNA, 22 nt, Artificial Sequence
  TRAC-targeting guide sequence portion
agacaccuucuuccccagccca

SEQ ID NO: 907 - RNA, 22 nt, Artificial Sequence
  TRAC-targeting guide sequence portion
agacagacuugucacuggauuu

SEQ ID NO: 908 - RNA, 22 nt, Artificial Sequence
  TRAC-targeting guide sequence portion
agaccucaugucuagcacaguu

SEQ ID NO: 909 - RNA, 22 nt, Artificial Sequence
  TRAC-targeting guide sequence portion
agacucuaaauccagugacaag

SEQ ID NO: 910 - RNA, 22 nt, Artificial Sequence
  TRAC-targeting guide sequence portion
agacuugucacuggauuuagag

SEQ ID NO: 911 - RNA, 22 nt, Artificial Sequence
  TRAC-targeting guide sequence portion
agagacucuaaauccagugaca

SEQ ID NO: 912 - RNA, 22 nt, Artificial Sequence
  TRAC-targeting guide sequence portion
agagcaacagugcuguggccug

SEQ ID NO: 913 - RNA, 22 nt, Artificial Sequence
  TRAC-targeting guide sequence portion
agauauccagaacccugacccu

SEQ ID NO: 914 - RNA, 22 nt, Artificial Sequence
  TRAC-targeting guide sequence portion
agauuuguugcuccaggccaca

SEQ ID NO: 915 - RNA, 22 nt, Artificial Sequence
  TRAC-targeting guide sequence portion
agcaacaaaucugacuuugcau

SEQ ID NO: 916 - RNA, 22 nt, Artificial Sequence
  TRAC-targeting guide sequence portion
agcaacagugcuguggccugga

SEQ ID NO: 917 - RNA, 22 nt, Artificial Sequence
  TRAC-targeting guide sequence portion
agcacaguuuugucugugauau

SEQ ID NO: 918 - RNA, 22 nt, Artificial Sequence
  TRAC-targeting guide sequence portion
agcacuguugcucuugaagucc

SEQ ID NO: 919 - RNA, 22 nt, Artificial Sequence
  TRAC-targeting guide sequence portion
agcauuauuccagaagacaccu

SEQ ID NO: 920 - RNA, 22 nt, Artificial Sequence
  TRAC-targeting guide sequence portion
agcugagagacucuaaauccag

SEQ ID NO: 921 - RNA, 22 nt, Artificial Sequence
  TRAC-targeting guide sequence portion
agcugguacacggcagggucag

SEQ ID NO: 922 - RNA, 22 nt, Artificial Sequence
  TRAC-targeting guide sequence portion
aggauucugauguguauaucac

SEQ ID NO: 923 - RNA, 22 nt, Artificial Sequence
  TRAC-targeting guide sequence portion
aggccacagcacuguugcucuu

SEQ ID NO: 924 - RNA, 22 nt, Artificial Sequence
  TRAC-targeting guide sequence portion
aggcguuugcacaugcaaaguc

SEQ ID NO: 925 - RNA, 22 nt, Artificial Sequence
  TRAC-targeting guide sequence portion
aggucuauggacuucaagagca

SEQ ID NO: 926 - RNA, 22 nt, Artificial Sequence
  TRAC-targeting guide sequence portion
aggugucuucuggaauaaugcu

SEQ ID NO: 927 - RNA, 22 nt, Artificial Sequence
  TRAC-targeting guide sequence portion
aguaaggauucugauguguaua

SEQ ID NO: 928 - RNA, 22 nt, Artificial Sequence
  TRAC-targeting guide sequence portion
agucagauuuguugcuccaggc

SEQ ID NO: 929 - RNA, 22 nt, Artificial Sequence
  TRAC-targeting guide sequence portion
aguccauagaccucaugucuag

SEQ ID NO: 930 - RNA, 22 nt, Artificial Sequence
  TRAC-targeting guide sequence portion
agucucucagcugguacacggc

SEQ ID NO: 931 - RNA, 22 nt, Artificial Sequence
  TRAC-targeting guide sequence portion
agucugucugccuauucaccga

SEQ ID NO: 932 - RNA, 22 nt, Artificial Sequence
  TRAC-targeting guide sequence portion
agugacaagucugucugccuau

SEQ ID NO: 933 - RNA, 22 nt, Artificial Sequence
  TRAC-targeting guide sequence portion
agugcuguggccuggagcaaca

SEQ ID NO: 934 - RNA, 22 nt, Artificial Sequence
  TRAC-targeting guide sequence portion
aguuuugucugugauauacaca

SEQ ID NO: 935 - RNA, 22 nt, Artificial Sequence
  TRAC-targeting guide sequence portion
auaaugcuguuguugaaggcgu

SEQ ID NO: 936 - RNA, 22 nt, Artificial Sequence
  TRAC-targeting guide sequence portion
auacacaucagaauccuuacuu

SEQ ID NO: 937 - RNA, 22 nt, Artificial Sequence
  TRAC-targeting guide sequence portion
auaggcagacagacuugucacu

SEQ ID NO: 938 - RNA, 22 nt, Artificial Sequence
  TRAC-targeting guide sequence portion
auauacacaucagaauccuuac

SEQ ID NO: 939 - RNA, 22 nt, Artificial Sequence
  TRAC-targeting guide sequence portion
auaucacagacaaaacugugcu

SEQ ID NO: 940 - RNA, 22 nt, Artificial Sequence
  TRAC-targeting guide sequence portion
auauccagaacccugacccugc

SEQ ID NO: 941 - RNA, 22 nt, Artificial Sequence
  TRAC-targeting guide sequence portion
aucacagacaaaacugugcuag

SEQ ID NO: 942 - RNA, 22 nt, Artificial Sequence
  TRAC-targeting guide sequence portion
aucagaauccuuacuuugugac

SEQ ID NO: 943 - RNA, 22 nt, Artificial Sequence
  TRAC-targeting guide sequence portion
auccagugacaagucugucugc

SEQ ID NO: 944 - RNA, 22 nt, Artificial Sequence
  TRAC-targeting guide sequence portion
auccuuacuuugugacacauuu

SEQ ID NO: 945 - RNA, 22 nt, Artificial Sequence
  TRAC-targeting guide sequence portion
aucggugaauaggcagacagac

SEQ ID NO: 946 - RNA, 22 nt, Artificial Sequence
  TRAC-targeting guide sequence portion
aucugacuuugcaugugcaaac

SEQ ID NO: 947 - RNA, 22 nt, Artificial Sequence
  TRAC-targeting guide sequence portion
augaggucuauggacuucaaga

SEQ ID NO: 948 - RNA, 22 nt, Artificial Sequence
  TRAC-targeting guide sequence portion
augcaaagucagauuuguugcu

SEQ ID NO: 949 - RNA, 22 nt, Artificial Sequence
  TRAC-targeting guide sequence portion
augcuguuguugaaggcguuug

SEQ ID NO: 950 - RNA, 22 nt, Artificial Sequence
  TRAC-targeting guide sequence portion
auggacuucaagagcaacagug

SEQ ID NO: 951 - RNA, 22 nt, Artificial Sequence
  TRAC-targeting guide sequence portion
augucuagcacaguuuugucug

SEQ ID NO: 952 - RNA, 22 nt, Artificial Sequence
  TRAC-targeting guide sequence portion
augugcaaacgccuucaacaac

SEQ ID NO: 953 - RNA, 22 nt, Artificial Sequence
  TRAC-targeting guide sequence portion
auguguauaucacagacaaaac

SEQ ID NO: 954 - RNA, 22 nt, Artificial Sequence
  TRAC-targeting guide sequence portion
augugucacaaaguaaggauuc

SEQ ID NO: 955 - RNA, 22 nt, Artificial Sequence
  TRAC-targeting guide sequence portion
auuauuccagaagacaccuucu

SEQ ID NO: 956 - RNA, 22 nt, Artificial Sequence
  TRAC-targeting guide sequence portion
auuccagaagacaccuucuucc

SEQ ID NO: 957 - RNA, 22 nt, Artificial Sequence
  TRAC-targeting guide sequence portion
auucugauguguauaucacaga

SEQ ID NO: 958 - RNA, 22 nt, Artificial Sequence
  TRAC-targeting guide sequence portion
auuuagagucucucagcuggua

SEQ ID NO: 959 - RNA, 22 nt, Artificial Sequence
  TRAC-targeting guide sequence portion
auuuguugcuccaggccacagc

SEQ ID NO: 960 - RNA, 22 nt, Artificial Sequence
  TRAC-targeting guide sequence portion
caaaacugugcuagacaugagg

SEQ ID NO: 961 - RNA, 22 nt, Artificial Sequence
  TRAC-targeting guide sequence portion
caaaaucggugaauaggcagac

SEQ ID NO: 962 - RNA, 22 nt, Artificial Sequence
  TRAC-targeting guide sequence portion
caaacaaaugugucacaaagua

SEQ ID NO: 963 - RNA, 22 nt, Artificial Sequence
  TRAC-targeting guide sequence portion
caaacgccuucaacaacagcau

SEQ ID NO: 964 - RNA, 22 nt, Artificial Sequence
  TRAC-targeting guide sequence portion
caaaguaaggauucugaugugu

SEQ ID NO: 965 - RNA, 22 nt, Artificial Sequence
  TRAC-targeting guide sequence portion
caaagucagauuuguugcucca

SEQ ID NO: 966 - RNA, 22 nt, Artificial Sequence
  TRAC-targeting guide sequence portion
caaaucugacuuugcaugugca

SEQ ID NO: 967 - RNA, 22 nt, Artificial Sequence
  TRAC-targeting guide sequence portion
caaaugugucacaaaguaagga

SEQ ID NO: 968 - RNA, 22 nt, Artificial Sequence
  TRAC-targeting guide sequence portion
caacaaaucugacuuugcaugu

SEQ ID NO: 969 - RNA, 22 nt, Artificial Sequence
  TRAC-targeting guide sequence portion
caacaacagcauuauuccagaa

SEQ ID NO: 970 - RNA, 22 nt, Artificial Sequence
  TRAC-targeting guide sequence portion
caacagcauuauuccagaagac

SEQ ID NO: 971 - RNA, 22 nt, Artificial Sequence
  TRAC-targeting guide sequence portion
caacagugcuguggccuggagc

SEQ ID NO: 972 - RNA, 22 nt, Artificial Sequence
  TRAC-targeting guide sequence portion
caagucugucugccuauucacc

SEQ ID NO: 973 - RNA, 22 nt, Artificial Sequence
  TRAC-targeting guide sequence portion
cacaaaguaaggauucugaugu

SEQ ID NO: 974 - RNA, 22 nt, Artificial Sequence
  TRAC-targeting guide sequence portion
cacagauauccagaacccugac

SEQ ID NO: 975 - RNA, 22 nt, Artificial Sequence
  TRAC-targeting guide sequence portion
cacagcacuguugcucuugaag

SEQ ID NO: 976 - RNA, 22 nt, Artificial Sequence
  TRAC-targeting guide sequence portion
cacaguuuugucugugauauac

SEQ ID NO: 977 - RNA, 22 nt, Artificial Sequence
  TRAC-targeting guide sequence portion
cacaucagaauccuuacuuugu

SEQ ID NO: 978 - RNA, 22 nt, Artificial Sequence
  TRAC-targeting guide sequence portion
cacauuuguuugagaaucaaaa

SEQ ID NO: 979 - RNA, 22 nt, Artificial Sequence
  TRAC-targeting guide sequence portion
caccgauuuugauucucaaaca

SEQ ID NO: 980 - RNA, 22 nt, Artificial Sequence
  TRAC-targeting guide sequence portion
cacggcagggucaggguucugg

SEQ ID NO: 981 - RNA, 22 nt, Artificial Sequence
  TRAC-targeting guide sequence portion
cacuggauuuagagucucucag

SEQ ID NO: 982 - RNA, 22 nt, Artificial Sequence
  TRAC-targeting guide sequence portion
cacuguugcucuugaaguccau

SEQ ID NO: 983 - RNA, 22 nt, Artificial Sequence
  TRAC-targeting guide sequence portion
cagaacccugacccugccgugu

SEQ ID NO: 984 - RNA, 22 nt, Artificial Sequence
  TRAC-targeting guide sequence portion
cagaagacaccuucuuccccag

SEQ ID NO: 985 - RNA, 22 nt, Artificial Sequence
  TRAC-targeting guide sequence portion
cagaauccuuacuuugugacac

SEQ ID NO: 986 - RNA, 22 nt, Artificial Sequence
  TRAC-targeting guide sequence portion
cagacaaaacugugcuagacau

SEQ ID NO: 987 - RNA, 22 nt, Artificial Sequence
  TRAC-targeting guide sequence portion
cagacuugucacuggauuuaga

SEQ ID NO: 988 - RNA, 22 nt, Artificial Sequence
  TRAC-targeting guide sequence portion
cagauauccagaacccugaccc

SEQ ID NO: 989 - RNA, 22 nt, Artificial Sequence
  TRAC-targeting guide sequence portion
cagauuuguugcuccaggccac

SEQ ID NO: 990 - RNA, 22 nt, Artificial Sequence
  TRAC-targeting guide sequence portion
cagcacuguugcucuugaaguc

SEQ ID NO: 991 - RNA, 22 nt, Artificial Sequence
  TRAC-targeting guide sequence portion
cagcauuauuccagaagacacc

SEQ ID NO: 992 - RNA, 22 nt, Artificial Sequence
  TRAC-targeting guide sequence portion
cagcugagagacucuaaaucca

SEQ ID NO: 993 - RNA, 22 nt, Artificial Sequence
  TRAC-targeting guide sequence portion
cagcugguacacggcaggguca

SEQ ID NO: 994 - RNA, 22 nt, Artificial Sequence
  TRAC-targeting guide sequence portion
caggccacagcacuguugcucu

SEQ ID NO: 995 - RNA, 22 nt, Artificial Sequence
  TRAC-targeting guide sequence portion
cagggucaggguucuggauauc

SEQ ID NO: 996 - RNA, 22 nt, Artificial Sequence
  TRAC-targeting guide sequence portion
cagugacaagucugucugccua

SEQ ID NO: 997 - RNA, 22 nt, Artificial Sequence
  TRAC-targeting guide sequence portion
cagugcuguggccuggagcaac

SEQ ID NO: 998 - RNA, 22 nt, Artificial Sequence
  TRAC-targeting guide sequence portion
caguuuugucugugauauacac

SEQ ID NO: 999 - RNA, 22 nt, Artificial Sequence
  TRAC-targeting guide sequence portion
cauagaccucaugucuagcaca

SEQ ID NO: 1000 - RNA, 22 nt, Artificial Sequence
  TRAC-targeting guide sequence portion
caucagaauccuuacuuuguga

SEQ ID NO: 1001 - RNA, 22 nt, Artificial Sequence
  TRAC-targeting guide sequence portion
caugaggucuauggacuucaag

SEQ ID NO: 1002 - RNA, 22 nt, Artificial Sequence
  TRAC-targeting guide sequence portion
caugcaaagucagauuuguugc

SEQ ID NO: 1003 - RNA, 22 nt, Artificial Sequence
  TRAC-targeting guide sequence portion
caugucuagcacaguuuugucu

SEQ ID NO: 1004 - RNA, 22 nt, Artificial Sequence
  TRAC-targeting guide sequence portion
cauuauuccagaagacaccuuc

SEQ ID NO: 1005 - RNA, 22 nt, Artificial Sequence
  TRAC-targeting guide sequence portion
cauuuguuugagaaucaaaauc

SEQ ID NO: 1006 - RNA, 22 nt, Artificial Sequence
  TRAC-targeting guide sequence portion
ccacagcacuguugcucuugaa

SEQ ID NO: 1007 - RNA, 22 nt, Artificial Sequence
  TRAC-targeting guide sequence portion
ccagaacccugacccugccgug

SEQ ID NO: 1008 - RNA, 22 nt, Artificial Sequence
  TRAC-targeting guide sequence portion
ccagaagacaccuucuucccca

SEQ ID NO: 1009 - RNA, 22 nt, Artificial Sequence
  TRAC-targeting guide sequence portion
ccagcugagagacucuaaaucc

SEQ ID NO: 1010 - RNA, 22 nt, Artificial Sequence
  TRAC-targeting guide sequence portion
ccagugacaagucugucugccu

SEQ ID NO: 1011 - RNA, 22 nt, Artificial Sequence
  TRAC-targeting guide sequence portion
ccauagaccucaugucuagcac

SEQ ID NO: 1012 - RNA, 22 nt, Artificial Sequence
  TRAC-targeting guide sequence portion
cccacagauauccagaacccug

SEQ ID NO: 1013 - RNA, 22 nt, Artificial Sequence
  TRAC-targeting guide sequence portion
cccugccguguaccagcugaga

SEQ ID NO: 1014 - RNA, 22 nt, Artificial Sequence
  TRAC-targeting guide sequence portion
cccuuaccugggcuggggaaga

SEQ ID NO: 1015 - RNA, 22 nt, Artificial Sequence
  TRAC-targeting guide sequence portion
ccgauuuugauucucaaacaaa

SEQ ID NO: 1016 - RNA, 22 nt, Artificial Sequence
  TRAC-targeting guide sequence portion
ccuauucaccgauuuugauucu

SEQ ID NO: 1017 - RNA, 22 nt, Artificial Sequence
  TRAC-targeting guide sequence portion
ccucaugucuagcacaguuuug

SEQ ID NO: 1018 - RNA, 22 nt, Artificial Sequence
  TRAC-targeting guide sequence portion
ccugacccugccguguaccagc

SEQ ID NO: 1019 - RNA, 22 nt, Artificial Sequence
  TRAC-targeting guide sequence portion
ccugccguguaccagcugagag

SEQ ID NO: 1020 - RNA, 22 nt, Artificial Sequence
  TRAC-targeting guide sequence portion
ccuggagcaacaaaucugacuu

SEQ ID NO: 1021 - RNA, 22 nt, Artificial Sequence
  TRAC-targeting guide sequence portion
ccugggcuggggaagaaggugu

SEQ ID NO: 1022 - RNA, 22 nt, Artificial Sequence
  TRAC-targeting guide sequence portion
ccuuaccugggcuggggaagaa

SEQ ID NO: 1023 - RNA, 22 nt, Artificial Sequence
  TRAC-targeting guide sequence portion
ccuucaacaacagcauuauucc

SEQ ID NO: 1024 - RNA, 22 nt, Artificial Sequence
  TRAC-targeting guide sequence portion
cgauuuugauucucaaacaaau

SEQ ID NO: 1025 - RNA, 22 nt, Artificial Sequence
  TRAC-targeting guide sequence portion
cgccuucaacaacagcauuauu

SEQ ID NO: 1026 - RNA, 22 nt, Artificial Sequence
  TRAC-targeting guide sequence portion
cggcagggucaggguucuggau

SEQ ID NO: 1027 - RNA, 22 nt, Artificial Sequence
  TRAC-targeting guide sequence portion
cggugaauaggcagacagacuu

SEQ ID NO: 1028 - RNA, 22 nt, Artificial Sequence
  TRAC-targeting guide sequence portion
cguguaccagcugagagacucu

SEQ ID NO: 1029 - RNA, 22 nt, Artificial Sequence
  TRAC-targeting guide sequence portion
cguuugcacaugcaaagucaga

SEQ ID NO: 1030 - RNA, 22 nt, Artificial Sequence
  TRAC-targeting guide sequence portion
cuaaauccagugacaagucugu

SEQ ID NO: 1031 - RNA, 22 nt, Artificial Sequence
  TRAC-targeting guide sequence portion
cuagacaugaggucuauggacu

SEQ ID NO: 1032 - RNA, 22 nt, Artificial Sequence
  TRAC-targeting guide sequence portion
cuauggacuucaagagcaacag

SEQ ID NO: 1033 - RNA, 22 nt, Artificial Sequence
  TRAC-targeting guide sequence portion
cuauucaccgauuuugauucuc

SEQ ID NO: 1034 - RNA, 22 nt, Artificial Sequence
  TRAC-targeting guide sequence portion
cucaaacaaaugugucacaaag

SEQ ID NO: 1035 - RNA, 22 nt, Artificial Sequence
  TRAC-targeting guide sequence portion
cucaugucuagcacaguuuugu

SEQ ID NO: 1036 - RNA, 22 nt, Artificial Sequence
  TRAC-targeting guide sequence portion
cuccaggccacagcacuguugc

SEQ ID NO: 1037 - RNA, 22 nt, Artificial Sequence
  TRAC-targeting guide sequence portion
cucuaaauccagugacaagucu

SEQ ID NO: 1038 - RNA, 22 nt, Artificial Sequence
  TRAC-targeting guide sequence portion
cucucagcugguacacggcagg

SEQ ID NO: 1039 - RNA, 22 nt, Artificial Sequence
  TRAC-targeting guide sequence portion
cucuugaaguccauagaccuca

SEQ ID NO: 1040 - RNA, 22 nt, Artificial Sequence
  TRAC-targeting guide sequence portion
cugacuuugcaugugcaaacgc

SEQ ID NO: 1041 - RNA, 22 nt, Artificial Sequence
  TRAC-targeting guide sequence portion
cugagagacucuaaauccagug

SEQ ID NO: 1042 - RNA, 22 nt, Artificial Sequence
  TRAC-targeting guide sequence portion
cugccguguaccagcugagaga

SEQ ID NO: 1043 - RNA, 22 nt, Artificial Sequence
  TRAC-targeting guide sequence portion
cugccuauucaccgauuuugau

SEQ ID NO: 1044 - RNA, 22 nt, Artificial Sequence
  TRAC-targeting guide sequence portion
cuggaauaaugcuguuguugaa

SEQ ID NO: 1045 - RNA, 22 nt, Artificial Sequence
  TRAC-targeting guide sequence portion
cuggagcaacaaaucugacuuu

SEQ ID NO: 1046 - RNA, 22 nt, Artificial Sequence
  TRAC-targeting guide sequence portion
cuggauuuagagucucucagcu

SEQ ID NO: 1047 - RNA, 22 nt, Artificial Sequence
  TRAC-targeting guide sequence portion
cugggcuggggaagaagguguc

SEQ ID NO: 1048 - RNA, 22 nt, Artificial Sequence
  TRAC-targeting guide sequence portion
cuggggaagaaggugucuucug

SEQ ID NO: 1049 - RNA, 22 nt, Artificial Sequence
  TRAC-targeting guide sequence portion
cugguacacggcagggucaggg

SEQ ID NO: 1050 - RNA, 22 nt, Artificial Sequence
  TRAC-targeting guide sequence portion
cugucugccuauucaccgauuu

SEQ ID NO: 1051 - RNA, 22 nt, Artificial Sequence
  TRAC-targeting guide sequence portion
cugugauauacacaucagaauc

SEQ ID NO: 1052 - RNA, 22 nt, Artificial Sequence
  TRAC-targeting guide sequence portion
cugugcuagacaugaggucuau

SEQ ID NO: 1053 - RNA, 22 nt, Artificial Sequence
  TRAC-targeting guide sequence portion
cuguggccuggagcaacaaauc

SEQ ID NO: 1054 - RNA, 22 nt, Artificial Sequence
  TRAC-targeting guide sequence portion
cuguugcucuugaaguccauag

SEQ ID NO: 1055 - RNA, 22 nt, Artificial Sequence
  TRAC-targeting guide sequence portion
cuguuguugaaggcguuugcac

SEQ ID NO: 1056 - RNA, 22 nt, Artificial Sequence
  TRAC-targeting guide sequence portion
cuuaccugggcuggggaagaag

SEQ ID NO: 1057 - RNA, 22 nt, Artificial Sequence
  TRAC-targeting guide sequence portion
cuuacuuugugacacauuuguu

SEQ ID NO: 1058 - RNA, 22 nt, Artificial Sequence
  TRAC-targeting guide sequence portion
cuucaacaacagcauuauucca

SEQ ID NO: 1059 - RNA, 22 nt, Artificial Sequence
  TRAC-targeting guide sequence portion
cuucaagagcaacagugcugug

SEQ ID NO: 1060 - RNA, 22 nt, Artificial Sequence
  TRAC-targeting guide sequence portion
cuucuggaauaaugcuguuguu

SEQ ID NO: 1061 - RNA, 22 nt, Artificial Sequence
  TRAC-targeting guide sequence portion
cuugaaguccauagaccucaug

SEQ ID NO: 1062 - RNA, 22 nt, Artificial Sequence
  TRAC-targeting guide sequence portion
cuugucacuggauuuagagucu

SEQ ID NO: 1063 - RNA, 22 nt, Artificial Sequence
  TRAC-targeting guide sequence portion
cuuugcaugugcaaacgccuuc

SEQ ID NO: 1064 - RNA, 22 nt, Artificial Sequence
  TRAC-targeting guide sequence portion
cuuugugacacauuuguuugag

SEQ ID NO: 1065 - RNA, 22 nt, Artificial Sequence
  TRAC-targeting guide sequence portion
gaacccugacccugccguguac

SEQ ID NO: 1066 - RNA, 22 nt, Artificial Sequence
  TRAC-targeting guide sequence portion
gaagaaggugucuucuggaaua

SEQ ID NO: 1067 - RNA, 22 nt, Artificial Sequence
  TRAC-targeting guide sequence portion
gaagacaccuucuuccccagcc

SEQ ID NO: 1068 - RNA, 22 nt, Artificial Sequence
  TRAC-targeting guide sequence portion
gaaggcguuugcacaugcaaag

SEQ ID NO: 1069 - RNA, 22 nt, Artificial Sequence
  TRAC-targeting guide sequence portion
gaaggugucuucuggaauaaug

SEQ ID NO: 1070 - RNA, 22 nt, Artificial Sequence
  TRAC-targeting guide sequence portion
gaaguccauagaccucaugucu

SEQ ID NO: 1071 - RNA, 22 nt, Artificial Sequence
  TRAC-targeting guide sequence portion
gaauaaugcuguuguugaaggc

SEQ ID NO: 1072 - RNA, 22 nt, Artificial Sequence
  TRAC-targeting guide sequence portion
gaaucaaaaucggugaauaggc

SEQ ID NO: 1073 - RNA, 22 nt, Artificial Sequence
  TRAC-targeting guide sequence portion
gaauccuuacuuugugacacau

SEQ ID NO: 1074 - RNA, 22 nt, Artificial Sequence
  TRAC-targeting guide sequence portion
gacaaaacugugcuagacauga

SEQ ID NO: 1075 - RNA, 22 nt, Artificial Sequence
  TRAC-targeting guide sequence portion
gacaagucugucugccuauuca

SEQ ID NO: 1076 - RNA, 22 nt, Artificial Sequence
  TRAC-targeting guide sequence portion
gacacauuuguuugagaaucaa

SEQ ID NO: 1077 - RNA, 22 nt, Artificial Sequence
  TRAC-targeting guide sequence portion
gacaccuucuuccccagcccag

SEQ ID NO: 1078 - RNA, 22 nt, Artificial Sequence
  TRAC-targeting guide sequence portion
gacagacuugucacuggauuua

SEQ ID NO: 1079 - RNA, 22 nt, Artificial Sequence
  TRAC-targeting guide sequence portion
gacaugaggucuauggacuuca

SEQ ID NO: 1080 - RNA, 22 nt, Artificial Sequence
  TRAC-targeting guide sequence portion
gacccugccguguaccagcuga

SEQ ID NO: 1081 - RNA, 22 nt, Artificial Sequence
  TRAC-targeting guide sequence portion
gaccucaugucuagcacaguuu

SEQ ID NO: 1082 - RNA, 22 nt, Artificial Sequence
  TRAC-targeting guide sequence portion
gacucuaaauccagugacaagu

SEQ ID NO: 1083 - RNA, 22 nt, Artificial Sequence
  TRAC-targeting guide sequence portion
gacuucaagagcaacagugcug

SEQ ID NO: 1084 - RNA, 22 nt, Artificial Sequence
  TRAC-targeting guide sequence portion
gacuugucacuggauuuagagu

SEQ ID NO: 1085 - RNA, 22 nt, Artificial Sequence
  TRAC-targeting guide sequence portion
gacuuugcaugugcaaacgccu

SEQ ID NO: 1086 - RNA, 22 nt, Artificial Sequence
  TRAC-targeting guide sequence portion
gagaaucaaaaucggugaauag

SEQ ID NO: 1087 - RNA, 22 nt, Artificial Sequence
  TRAC-targeting guide sequence portion
gagacucuaaauccagugacaa

SEQ ID NO: 1088 - RNA, 22 nt, Artificial Sequence
  TRAC-targeting guide sequence portion
gagagacucuaaauccagugac

SEQ ID NO: 1089 - RNA, 22 nt, Artificial Sequence
  TRAC-targeting guide sequence portion
gagcaacaaaucugacuuugca

SEQ ID NO: 1090 - RNA, 22 nt, Artificial Sequence
  TRAC-targeting guide sequence portion
gagcaacagugcuguggccugg

SEQ ID NO: 1091 - RNA, 22 nt, Artificial Sequence
  TRAC-targeting guide sequence portion
gaggucuauggacuucaagagc

SEQ ID NO: 1092 - RNA, 22 nt, Artificial Sequence
  TRAC-targeting guide sequence portion
gauauacacaucagaauccuua

SEQ ID NO: 1093 - RNA, 22 nt, Artificial Sequence
  TRAC-targeting guide sequence portion
gauauccagaacccugacccug

SEQ ID NO: 1094 - RNA, 22 nt, Artificial Sequence
  TRAC-targeting guide sequence portion
gauguguauaucacagacaaaa

SEQ ID NO: 1095 - RNA, 22 nt, Artificial Sequence
  TRAC-targeting guide sequence portion
gauucugauguguauaucacag

SEQ ID NO: 1096 - RNA, 22 nt, Artificial Sequence
  TRAC-targeting guide sequence portion
gauuuguugcuccaggccacag

SEQ ID NO: 1097 - RNA, 22 nt, Artificial Sequence
  TRAC-targeting guide sequence portion
gauuuugauucucaaacaaaug

SEQ ID NO: 1098 - RNA, 22 nt, Artificial Sequence
  TRAC-targeting guide sequence portion
gcaaacgccuucaacaacagca

SEQ ID NO: 1099 - RNA, 22 nt, Artificial Sequence
  TRAC-targeting guide sequence portion
gcaaagucagauuuguugcucc

SEQ ID NO: 1100 - RNA, 22 nt, Artificial Sequence
  TRAC-targeting guide sequence portion
gcaacaaaucugacuuugcaug

SEQ ID NO: 1101 - RNA, 22 nt, Artificial Sequence
  TRAC-targeting guide sequence portion
gcaacagugcuguggccuggag

SEQ ID NO: 1102 - RNA, 22 nt, Artificial Sequence
  TRAC-targeting guide sequence portion
gcacaguuuugucugugauaua

SEQ ID NO: 1103 - RNA, 22 nt, Artificial Sequence
  TRAC-targeting guide sequence portion
gcacaugcaaagucagauuugu

SEQ ID NO: 1104 - RNA, 22 nt, Artificial Sequence
  TRAC-targeting guide sequence portion
gcacuguugcucuugaagucca

SEQ ID NO: 1105 - RNA, 22 nt, Artificial Sequence
  TRAC-targeting guide sequence portion
gcagacagacuugucacuggau

SEQ ID NO: 1106 - RNA, 22 nt, Artificial Sequence
  TRAC-targeting guide sequence portion
gcagggucaggguucuggauau

SEQ ID NO: 1107 - RNA, 22 nt, Artificial Sequence
  TRAC-targeting guide sequence portion
gcaugugcaaacgccuucaaca

SEQ ID NO: 1108 - RNA, 22 nt, Artificial Sequence
  TRAC-targeting guide sequence portion
gcauuauuccagaagacaccuu

SEQ ID NO: 1109 - RNA, 22 nt, Artificial Sequence
  TRAC-targeting guide sequence portion
gccacagcacuguugcucuuga

SEQ ID NO: 1110 - RNA, 22 nt, Artificial Sequence
  TRAC-targeting guide sequence portion
gccguguaccagcugagagacu

SEQ ID NO: 1111 - RNA, 22 nt, Artificial Sequence
  TRAC-targeting guide sequence portion
gccuauucaccgauuuugauuc

SEQ ID NO: 1112 - RNA, 22 nt, Artificial Sequence
  TRAC-targeting guide sequence portion
gccuggagcaacaaaucugacu

SEQ ID NO: 1113 - RNA, 22 nt, Artificial Sequence
  TRAC-targeting guide sequence portion
gcguuugcacaugcaaagucag

SEQ ID NO: 1114 - RNA, 22 nt, Artificial Sequence
  TRAC-targeting guide sequence portion
gcuagacaugaggucuauggac

SEQ ID NO: 1115 - RNA, 22 nt, Artificial Sequence
  TRAC-targeting guide sequence portion
gcuccaggccacagcacuguug

SEQ ID NO: 1116 - RNA, 22 nt, Artificial Sequence
  TRAC-targeting guide sequence portion
gcucuugaaguccauagaccuc

SEQ ID NO: 1117 - RNA, 22 nt, Artificial Sequence
  TRAC-targeting guide sequence portion
gcugagagacucuaaauccagu

SEQ ID NO: 1118 - RNA, 22 nt, Artificial Sequence
  TRAC-targeting guide sequence portion
gcuggggaagaaggugucuucu

SEQ ID NO: 1119 - RNA, 22 nt, Artificial Sequence
  TRAC-targeting guide sequence portion
gcugguacacggcagggucagg

SEQ ID NO: 1120 - RNA, 22 nt, Artificial Sequence
  TRAC-targeting guide sequence portion
gcuguggccuggagcaacaaau

SEQ ID NO: 1121 - RNA, 22 nt, Artificial Sequence
  TRAC-targeting guide sequence portion
gcuguuguugaaggcguuugca

SEQ ID NO: 1122 - RNA, 22 nt, Artificial Sequence
  TRAC-targeting guide sequence portion
ggaagaaggugucuucuggaau

SEQ ID NO: 1123 - RNA, 22 nt, Artificial Sequence
  TRAC-targeting guide sequence portion
ggaauaaugcuguuguugaagg

SEQ ID NO: 1124 - RNA, 22 nt, Artificial Sequence
  TRAC-targeting guide sequence portion
ggacuucaagagcaacagugcu

SEQ ID NO: 1125 - RNA, 22 nt, Artificial Sequence
  TRAC-targeting guide sequence portion
ggagcaacaaaucugacuuugc

SEQ ID NO: 1126 - RNA, 22 nt, Artificial Sequence
  TRAC-targeting guide sequence portion
ggauucugauguguauaucaca

SEQ ID NO: 1127 - RNA, 22 nt, Artificial Sequence
  TRAC-targeting guide sequence portion
ggauuuagagucucucagcugg

SEQ ID NO: 1128 - RNA, 22 nt, Artificial Sequence
  TRAC-targeting guide sequence portion
ggcagacagacuugucacugga

SEQ ID NO: 1129 - RNA, 22 nt, Artificial Sequence
  TRAC-targeting guide sequence portion
ggcagggucaggguucuggaua

SEQ ID NO: 1130 - RNA, 22 nt, Artificial Sequence
  TRAC-targeting guide sequence portion
ggccacagcacuguugcucuug

SEQ ID NO: 1131 - RNA, 22 nt, Artificial Sequence
  TRAC-targeting guide sequence portion
ggccuggagcaacaaaucugac

SEQ ID NO: 1132 - RNA, 22 nt, Artificial Sequence
  TRAC-targeting guide sequence portion
ggcguuugcacaugcaaaguca

SEQ ID NO: 1133 - RNA, 22 nt, Artificial Sequence
  TRAC-targeting guide sequence portion
gggaagaaggugucuucuggaa

SEQ ID NO: 1134 - RNA, 22 nt, Artificial Sequence
  TRAC-targeting guide sequence portion
ggggaagaaggugucuucugga

SEQ ID NO: 1135 - RNA, 22 nt, Artificial Sequence
  TRAC-targeting guide sequence portion
ggucuauggacuucaagagcaa

SEQ ID NO: 1136 - RNA, 22 nt, Artificial Sequence
  TRAC-targeting guide sequence portion
ggugucuucuggaauaaugcug

SEQ ID NO: 1137 - RNA, 22 nt, Artificial Sequence
  TRAC-targeting guide sequence portion
guaaggauucugauguguauau

SEQ ID NO: 1138 - RNA, 22 nt, Artificial Sequence
  TRAC-targeting guide sequence portion
guaccagcugagagacucuaaa

SEQ ID NO: 1139 - RNA, 22 nt, Artificial Sequence
  TRAC-targeting guide sequence portion
guauaucacagacaaaacugug

SEQ ID NO: 1140 - RNA, 22 nt, Artificial Sequence
  TRAC-targeting guide sequence portion
gucacaaaguaaggauucugau

SEQ ID NO: 1141 - RNA, 22 nt, Artificial Sequence
  TRAC-targeting guide sequence portion
gucacuggauuuagagucucuc

SEQ ID NO: 1142 - RNA, 22 nt, Artificial Sequence
  TRAC-targeting guide sequence portion
gucagauuuguugcuccaggcc

SEQ ID NO: 1143 - RNA, 22 nt, Artificial Sequence
  TRAC-targeting guide sequence portion
guccauagaccucaugucuagc

SEQ ID NO: 1144 - RNA, 22 nt, Artificial Sequence
  TRAC-targeting guide sequence portion
gucuagcacaguuuugucugug

SEQ ID NO: 1145 - RNA, 22 nt, Artificial Sequence
  TRAC-targeting guide sequence portion
gucuauggacuucaagagcaac

SEQ ID NO: 1146 - RNA, 22 nt, Artificial Sequence
  TRAC-targeting guide sequence portion
gucucucagcugguacacggca

SEQ ID NO: 1147 - RNA, 22 nt, Artificial Sequence
  TRAC-targeting guide sequence portion
gucugccuauucaccgauuuug

SEQ ID NO: 1148 - RNA, 22 nt, Artificial Sequence
  TRAC-targeting guide sequence portion
gucugucugccuauucaccgau

SEQ ID NO: 1149 - RNA, 22 nt, Artificial Sequence
  TRAC-targeting guide sequence portion
gugacaagucugucugccuauu

SEQ ID NO: 1150 - RNA, 22 nt, Artificial Sequence
  TRAC-targeting guide sequence portion
gugauauacacaucagaauccu

SEQ ID NO: 1151 - RNA, 22 nt, Artificial Sequence
  TRAC-targeting guide sequence portion
gugcaaacgccuucaacaacag

SEQ ID NO: 1152 - RNA, 22 nt, Artificial Sequence
  TRAC-targeting guide sequence portion
gugcuagacaugaggucuaugg

SEQ ID NO: 1153 - RNA, 22 nt, Artificial Sequence
  TRAC-targeting guide sequence portion
gugcuguggccuggagcaacaa

SEQ ID NO: 1154 - RNA, 22 nt, Artificial Sequence
  TRAC-targeting guide sequence portion
guggccuggagcaacaaaucug

SEQ ID NO: 1155 - RNA, 22 nt, Artificial Sequence
  TRAC-targeting guide sequence portion
guguaccagcugagagacucua

SEQ ID NO: 1156 - RNA, 22 nt, Artificial Sequence
  TRAC-targeting guide sequence portion
guguauaucacagacaaaacug

SEQ ID NO: 1157 - RNA, 22 nt, Artificial Sequence
  TRAC-targeting guide sequence portion
gugucacaaaguaaggauucug

SEQ ID NO: 1158 - RNA, 22 nt, Artificial Sequence
  TRAC-targeting guide sequence portion
gugucuucuggaauaaugcugu

SEQ ID NO: 1159 - RNA, 22 nt, Artificial Sequence
  TRAC-targeting guide sequence portion
guugaaggcguuugcacaugca

SEQ ID NO: 1160 - RNA, 22 nt, Artificial Sequence
  TRAC-targeting guide sequence portion
guugcucuugaaguccauagac

SEQ ID NO: 1161 - RNA, 22 nt, Artificial Sequence
  TRAC-targeting guide sequence portion
guuguugaaggcguuugcacau

SEQ ID NO: 1162 - RNA, 22 nt, Artificial Sequence
  TRAC-targeting guide sequence portion
guuugagaaucaaaaucgguga

SEQ ID NO: 1163 - RNA, 22 nt, Artificial Sequence
  TRAC-targeting guide sequence portion
guuugcacaugcaaagucagau

SEQ ID NO: 1164 - RNA, 22 nt, Artificial Sequence
  TRAC-targeting guide sequence portion
uaaauccagugacaagucuguc

SEQ ID NO: 1165 - RNA, 22 nt, Artificial Sequence
  TRAC-targeting guide sequence portion
uaaggauucugauguguauauc

SEQ ID NO: 1166 - RNA, 22 nt, Artificial Sequence
  TRAC-targeting guide sequence portion
uaaugcuguuguugaaggcguu

SEQ ID NO: 1167 - RNA, 22 nt, Artificial Sequence
  TRAC-targeting guide sequence portion
uacacaucagaauccuuacuuu

SEQ ID NO: 1168 - RNA, 22 nt, Artificial Sequence
  TRAC-targeting guide sequence portion
uacacggcagggucaggguucu

SEQ ID NO: 1169 - RNA, 22 nt, Artificial Sequence
  TRAC-targeting guide sequence portion
uaccagcugagagacucuaaau

SEQ ID NO: 1170 - RNA, 22 nt, Artificial Sequence
  TRAC-targeting guide sequence portion
uaccugggcuggggaagaaggu

SEQ ID NO: 1171 - RNA, 22 nt, Artificial Sequence
  TRAC-targeting guide sequence portion
uacuuugugacacauuuguuug

SEQ ID NO: 1172 - RNA, 22 nt, Artificial Sequence
  TRAC-targeting guide sequence portion
uagacaugaggucuauggacuu

SEQ ID NO: 1173 - RNA, 22 nt, Artificial Sequence
  TRAC-targeting guide sequence portion
uagaccucaugucuagcacagu

SEQ ID NO: 1174 - RNA, 22 nt, Artificial Sequence
  TRAC-targeting guide sequence portion
uagagucucucagcugguacac

SEQ ID NO: 1175 - RNA, 22 nt, Artificial Sequence
  TRAC-targeting guide sequence portion
uagcacaguuuugucugugaua

SEQ ID NO: 1176 - RNA, 22 nt, Artificial Sequence
  TRAC-targeting guide sequence portion
uaggcagacagacuugucacug

SEQ ID NO: 1177 - RNA, 22 nt, Artificial Sequence
  TRAC-targeting guide sequence portion
uauacacaucagaauccuuacu

SEQ ID NO: 1178 - RNA, 22 nt, Artificial Sequence
  TRAC-targeting guide sequence portion
uauaucacagacaaaacugugc

SEQ ID NO: 1179 - RNA, 22 nt, Artificial Sequence
  TRAC-targeting guide sequence portion
uaucacagacaaaacugugcua

SEQ ID NO: 1180 - RNA, 22 nt, Artificial Sequence
  TRAC-targeting guide sequence portion
uauccagaacccugacccugcc

SEQ ID NO: 1181 - RNA, 22 nt, Artificial Sequence
  TRAC-targeting guide sequence portion
uauuccagaagacaccuucuuc

SEQ ID NO: 1182 - RNA, 22 nt, Artificial Sequence
  TRAC-targeting guide sequence portion
ucaaaaucggugaauaggcaga

SEQ ID NO: 1183 - RNA, 22 nt, Artificial Sequence
  TRAC-targeting guide sequence portion
ucaacaacagcauuauuccaga

SEQ ID NO: 1184 - RNA, 22 nt, Artificial Sequence
  TRAC-targeting guide sequence portion
ucacaaaguaaggauucugaug

SEQ ID NO: 1185 - RNA, 22 nt, Artificial Sequence
  TRAC-targeting guide sequence portion
ucacagacaaaacugugcuaga

SEQ ID NO: 1186 - RNA, 22 nt, Artificial Sequence
  TRAC-targeting guide sequence portion
ucaccgauuuugauucucaaac

SEQ ID NO: 1187 - RNA, 22 nt, Artificial Sequence
  TRAC-targeting guide sequence portion
ucacuggauuuagagucucuca

SEQ ID NO: 1188 - RNA, 22 nt, Artificial Sequence
  TRAC-targeting guide sequence portion
ucagaauccuuacuuugugaca

SEQ ID NO: 1189 - RNA, 22 nt, Artificial Sequence
  TRAC-targeting guide sequence portion
ucagauuuguugcuccaggcca

SEQ ID NO: 1190 - RNA, 22 nt, Artificial Sequence
  TRAC-targeting guide sequence portion
ucagcugguacacggcaggguc

SEQ ID NO: 1191 - RNA, 22 nt, Artificial Sequence
  TRAC-targeting guide sequence portion
ucaugucuagcacaguuuuguc

SEQ ID NO: 1192 - RNA, 22 nt, Artificial Sequence
  TRAC-targeting guide sequence portion
uccagaacccugacccugccgu

SEQ ID NO: 1193 - RNA, 22 nt, Artificial Sequence
  TRAC-targeting guide sequence portion
uccagaagacaccuucuucccc

SEQ ID NO: 1194 - RNA, 22 nt, Artificial Sequence
  TRAC-targeting guide sequence portion
uccaggccacagcacuguugcu

SEQ ID NO: 1195 - RNA, 22 nt, Artificial Sequence
  TRAC-targeting guide sequence portion
uccagugacaagucugucugcc

SEQ ID NO: 1196 - RNA, 22 nt, Artificial Sequence
  TRAC-targeting guide sequence portion
uccauagaccucaugucuagca

SEQ ID NO: 1197 - RNA, 22 nt, Artificial Sequence
  TRAC-targeting guide sequence portion
uccuuacuuugugacacauuug

SEQ ID NO: 1198 - RNA, 22 nt, Artificial Sequence
  TRAC-targeting guide sequence portion
ucggugaauaggcagacagacu

SEQ ID NO: 1199 - RNA, 22 nt, Artificial Sequence
  TRAC-targeting guide sequence portion
ucuaaauccagugacaagucug

SEQ ID NO: 1200 - RNA, 22 nt, Artificial Sequence
  TRAC-targeting guide sequence portion
ucuagcacaguuuugucuguga

SEQ ID NO: 1201 - RNA, 22 nt, Artificial Sequence
  TRAC-targeting guide sequence portion
ucuauggacuucaagagcaaca

SEQ ID NO: 1202 - RNA, 22 nt, Artificial Sequence
  TRAC-targeting guide sequence portion
ucucaaacaaaugugucacaaa

SEQ ID NO: 1203 - RNA, 22 nt, Artificial Sequence
  TRAC-targeting guide sequence portion
ucucagcugguacacggcaggg

SEQ ID NO: 1204 - RNA, 22 nt, Artificial Sequence
  TRAC-targeting guide sequence portion
ucucucagcugguacacggcag

SEQ ID NO: 1205 - RNA, 22 nt, Artificial Sequence
  TRAC-targeting guide sequence portion
ucugacuuugcaugugcaaacg

SEQ ID NO: 1206 - RNA, 22 nt, Artificial Sequence
  TRAC-targeting guide sequence portion
ucugauguguauaucacagaca

SEQ ID NO: 1207 - RNA, 22 nt, Artificial Sequence
  TRAC-targeting guide sequence portion
ucugccuauucaccgauuuuga

SEQ ID NO: 1208 - RNA, 22 nt, Artificial Sequence
  TRAC-targeting guide sequence portion
ucuggaauaaugcuguuguuga

SEQ ID NO: 1209 - RNA, 22 nt, Artificial Sequence
  TRAC-targeting guide sequence portion
ucugucugccuauucaccgauu

SEQ ID NO: 1210 - RNA, 22 nt, Artificial Sequence
  TRAC-targeting guide sequence portion
ucuucuggaauaaugcuguugu

SEQ ID NO: 1211 - RNA, 22 nt, Artificial Sequence
  TRAC-targeting guide sequence portion
ucuugaaguccauagaccucau

SEQ ID NO: 1212 - RNA, 22 nt, Artificial Sequence
  TRAC-targeting guide sequence portion
ugaaggcguuugcacaugcaaa

SEQ ID NO: 1213 - RNA, 22 nt, Artificial Sequence
  TRAC-targeting guide sequence portion
ugaaguccauagaccucauguc

SEQ ID NO: 1214 - RNA, 22 nt, Artificial Sequence
  TRAC-targeting guide sequence portion
ugaauaggcagacagacuuguc

SEQ ID NO: 1215 - RNA, 22 nt, Artificial Sequence
  TRAC-targeting guide sequence portion
ugacaagucugucugccuauuc

SEQ ID NO: 1216 - RNA, 22 nt, Artificial Sequence
  TRAC-targeting guide sequence portion
ugacccugccguguaccagcug

SEQ ID NO: 1217 - RNA, 22 nt, Artificial Sequence
  TRAC-targeting guide sequence portion
ugacuuugcaugugcaaacgcc

SEQ ID NO: 1218 - RNA, 22 nt, Artificial Sequence
  TRAC-targeting guide sequence portion
ugagaaucaaaaucggugaaua

SEQ ID NO: 1219 - RNA, 22 nt, Artificial Sequence
  TRAC-targeting guide sequence portion
ugagagacucuaaauccaguga

SEQ ID NO: 1220 - RNA, 22 nt, Artificial Sequence
  TRAC-targeting guide sequence portion
ugaggucuauggacuucaagag

SEQ ID NO: 1221 - RNA, 22 nt, Artificial Sequence
  TRAC-targeting guide sequence portion
ugauauacacaucagaauccuu

SEQ ID NO: 1222 - RNA, 22 nt, Artificial Sequence
  TRAC-targeting guide sequence portion
ugauguguauaucacagacaaa

SEQ ID NO: 1223 - RNA, 22 nt, Artificial Sequence
  TRAC-targeting guide sequence portion
ugauucucaaacaaauguguca

SEQ ID NO: 1224 - RNA, 22 nt, Artificial Sequence
  TRAC-targeting guide sequence portion
ugcaaacgccuucaacaacagc

SEQ ID NO: 1225 - RNA, 22 nt, Artificial Sequence
  TRAC-targeting guide sequence portion
ugcaaagucagauuuguugcuc

SEQ ID NO: 1226 - RNA, 22 nt, Artificial Sequence
  TRAC-targeting guide sequence portion
ugcacaugcaaagucagauuug

SEQ ID NO: 1227 - RNA, 22 nt, Artificial Sequence
  TRAC-targeting guide sequence portion
ugcaugugcaaacgccuucaac

SEQ ID NO: 1228 - RNA, 22 nt, Artificial Sequence
  TRAC-targeting guide sequence portion
ugccguguaccagcugagagac

SEQ ID NO: 1229 - RNA, 22 nt, Artificial Sequence
  TRAC-targeting guide sequence portion
ugccuauucaccgauuuugauu

SEQ ID NO: 1230 - RNA, 22 nt, Artificial Sequence
  TRAC-targeting guide sequence portion
ugcuagacaugaggucuaugga

SEQ ID NO: 1231 - RNA, 22 nt, Artificial Sequence
  TRAC-targeting guide sequence portion
ugcuccaggccacagcacuguu

SEQ ID NO: 1232 - RNA, 22 nt, Artificial Sequence
  TRAC-targeting guide sequence portion
ugcucuugaaguccauagaccu

SEQ ID NO: 1233 - RNA, 22 nt, Artificial Sequence
  TRAC-targeting guide sequence portion
ugcuguggccuggagcaacaaa

SEQ ID NO: 1234 - RNA, 22 nt, Artificial Sequence
  TRAC-targeting guide sequence portion
ugcuguuguugaaggcguuugc

SEQ ID NO: 1235 - RNA, 22 nt, Artificial Sequence
  TRAC-targeting guide sequence portion
uggaauaaugcuguuguugaag

SEQ ID NO: 1236 - RNA, 22 nt, Artificial Sequence
  TRAC-targeting guide sequence portion
uggacuucaagagcaacagugc

SEQ ID NO: 1237 - RNA, 22 nt, Artificial Sequence
  TRAC-targeting guide sequence portion
uggagcaacaaaucugacuuug

SEQ ID NO: 1238 - RNA, 22 nt, Artificial Sequence
  TRAC-targeting guide sequence portion
uggauuuagagucucucagcug

SEQ ID NO: 1239 - RNA, 22 nt, Artificial Sequence
  TRAC-targeting guide sequence portion
ugggcuggggaagaaggugucu

SEQ ID NO: 1240 - RNA, 22 nt, Artificial Sequence
  TRAC-targeting guide sequence portion
uggggaagaaggugucuucugg

SEQ ID NO: 1241 - RNA, 22 nt, Artificial Sequence
  TRAC-targeting guide sequence portion
ugguacacggcagggucagggu

SEQ ID NO: 1242 - RNA, 22 nt, Artificial Sequence
  TRAC-targeting guide sequence portion
uguaccagcugagagacucuaa

SEQ ID NO: 1243 - RNA, 22 nt, Artificial Sequence
  TRAC-targeting guide sequence portion
uguauaucacagacaaaacugu

SEQ ID NO: 1244 - RNA, 22 nt, Artificial Sequence
  TRAC-targeting guide sequence portion
ugucacaaaguaaggauucuga

SEQ ID NO: 1245 - RNA, 22 nt, Artificial Sequence
  TRAC-targeting guide sequence portion
ugucacuggauuuagagucucu

SEQ ID NO: 1246 - RNA, 22 nt, Artificial Sequence
  TRAC-targeting guide sequence portion
ugucuagcacaguuuugucugu

SEQ ID NO: 1247 - RNA, 22 nt, Artificial Sequence
  TRAC-targeting guide sequence portion
ugucugugauauacacaucaga

SEQ ID NO: 1248 - RNA, 22 nt, Artificial Sequence
  TRAC-targeting guide sequence portion
ugucuucuggaauaaugcuguu

SEQ ID NO: 1249 - RNA, 22 nt, Artificial Sequence
  TRAC-targeting guide sequence portion
ugugauauacacaucagaaucc

SEQ ID NO: 1250 - RNA, 22 nt, Artificial Sequence
  TRAC-targeting guide sequence portion
ugugcaaacgccuucaacaaca

SEQ ID NO: 1251 - RNA, 22 nt, Artificial Sequence
  TRAC-targeting guide sequence portion
ugugcuagacaugaggucuaug

SEQ ID NO: 1252 - RNA, 22 nt, Artificial Sequence
  TRAC-targeting guide sequence portion
uguggccuggagcaacaaaucu

SEQ ID NO: 1253 - RNA, 22 nt, Artificial Sequence
  TRAC-targeting guide sequence portion
uguguauaucacagacaaaacu

SEQ ID NO: 1254 - RNA, 22 nt, Artificial Sequence
  TRAC-targeting guide sequence portion
ugugucacaaaguaaggauucu

SEQ ID NO: 1255 - RNA, 22 nt, Artificial Sequence
  TRAC-targeting guide sequence portion
uguugaaggcguuugcacaugc

SEQ ID NO: 1256 - RNA, 22 nt, Artificial Sequence
  TRAC-targeting guide sequence portion
uguugcuccaggccacagcacu

SEQ ID NO: 1257 - RNA, 22 nt, Artificial Sequence
  TRAC-targeting guide sequence portion
uguugcucuugaaguccauaga

SEQ ID NO: 1258 - RNA, 22 nt, Artificial Sequence
  TRAC-targeting guide sequence portion
uguuguugaaggcguuugcaca

SEQ ID NO: 1259 - RNA, 22 nt, Artificial Sequence
  TRAC-targeting guide sequence portion
uguuugagaaucaaaaucggug

SEQ ID NO: 1260 - RNA, 22 nt, Artificial Sequence
  TRAC-targeting guide sequence portion
uuaccugggcuggggaagaagg

SEQ ID NO: 1261 - RNA, 22 nt, Artificial Sequence
  TRAC-targeting guide sequence portion
uuauuccagaagacaccuucuu

SEQ ID NO: 1262 - RNA, 22 nt, Artificial Sequence
  TRAC-targeting guide sequence portion
uucaacaacagcauuauuccag

SEQ ID NO: 1263 - RNA, 22 nt, Artificial Sequence
  TRAC-targeting guide sequence portion
uucaagagcaacagugcugugg

SEQ ID NO: 1264 - RNA, 22 nt, Artificial Sequence
  TRAC-targeting guide sequence portion
uucaccgauuuugauucucaaa

SEQ ID NO: 1265 - RNA, 22 nt, Artificial Sequence
  TRAC-targeting guide sequence portion
uuccagaagacaccuucuuccc

SEQ ID NO: 1266 - RNA, 22 nt, Artificial Sequence
  TRAC-targeting guide sequence portion
uucucaaacaaaugugucacaa

SEQ ID NO: 1267 - RNA, 22 nt, Artificial Sequence
  TRAC-targeting guide sequence portion
uucugauguguauaucacagac

SEQ ID NO: 1268 - RNA, 22 nt, Artificial Sequence
  TRAC-targeting guide sequence portion
uucuggaauaaugcuguuguug

SEQ ID NO: 1269 - RNA, 22 nt, Artificial Sequence
  TRAC-targeting guide sequence portion
uugaaggcguuugcacaugcaa

SEQ ID NO: 1270 - RNA, 22 nt, Artificial Sequence
  TRAC-targeting guide sequence portion
uugaaguccauagaccucaugu

SEQ ID NO: 1271 - RNA, 22 nt, Artificial Sequence
  TRAC-targeting guide sequence portion
uugagaaucaaaaucggugaau

SEQ ID NO: 1272 - RNA, 22 nt, Artificial Sequence
  TRAC-targeting guide sequence portion
uugauucucaaacaaauguguc

SEQ ID NO: 1273 - RNA, 22 nt, Artificial Sequence
  TRAC-targeting guide sequence portion
uugcacaugcaaagucagauuu

SEQ ID NO: 1274 - RNA, 22 nt, Artificial Sequence
  TRAC-targeting guide sequence portion
uugcaugugcaaacgccuucaa

SEQ ID NO: 1275 - RNA, 22 nt, Artificial Sequence
  TRAC-targeting guide sequence portion
uugcucuugaaguccauagacc

SEQ ID NO: 1276 - RNA, 22 nt, Artificial Sequence
  TRAC-targeting guide sequence portion
uugucacuggauuuagagucuc

SEQ ID NO: 1277 - RNA, 22 nt, Artificial Sequence
  TRAC-targeting guide sequence portion
uugucugugauauacacaucag

SEQ ID NO: 1278 - RNA, 22 nt, Artificial Sequence
  TRAC-targeting guide sequence portion
uuguugaaggcguuugcacaug

SEQ ID NO: 1279 - RNA, 22 nt, Artificial Sequence
  TRAC-targeting guide sequence portion
uuguugcuccaggccacagcac

SEQ ID NO: 1280 - RNA, 22 nt, Artificial Sequence
  TRAC-targeting guide sequence portion
uuguuugagaaucaaaaucggu

SEQ ID NO: 1281 - RNA, 22 nt, Artificial Sequence
  TRAC-targeting guide sequence portion
uuuagagucucucagcugguac

SEQ ID NO: 1282 - RNA, 22 nt, Artificial Sequence
  TRAC-targeting guide sequence portion
uuugcacaugcaaagucagauu

SEQ ID NO: 1283 - RNA, 22 nt, Artificial Sequence
  TRAC-targeting guide sequence portion
uuugcaugugcaaacgccuuca

SEQ ID NO: 1284 - RNA, 22 nt, Artificial Sequence
  TRAC-targeting guide sequence portion
uuugucugugauauacacauca

SEQ ID NO: 1285 - RNA, 22 nt, Artificial Sequence
  TRAC-targeting guide sequence portion
uuuguugcuccaggccacagca

SEQ ID NO: 1286 - RNA, 22 nt, Artificial Sequence
  TRAC-targeting guide sequence portion
uuuugucugugauauacacauc

SEQ ID NO: 1287 - RNA, 20 nt, Artificial Sequence
  TRAC-targeting guide sequence portion
aaaguuccugugaugucaag

SEQ ID NO: 1288 - RNA, 20 nt, Artificial Sequence
  TRAC-targeting guide sequence portion
aagcuggucgagaaaagcuu

SEQ ID NO: 1289 - RNA, 20 nt, Artificial Sequence
  TRAC-targeting guide sequence portion
aagcuuuucucgaccagcuu

SEQ ID NO: 1290 - RNA, 20 nt, Artificial Sequence
  TRAC-targeting guide sequence portion
accagcuugacaucacagga

SEQ ID NO: 1291 - RNA, 20 nt, Artificial Sequence
  TRAC-targeting guide sequence portion
accuguuucaaagcuuuucu

SEQ ID NO: 1292 - RNA, 20 nt, Artificial Sequence
  TRAC-targeting guide sequence portion
agcuggucgagaaaagcuuu

SEQ ID NO: 1293 - RNA, 20 nt, Artificial Sequence
  TRAC-targeting guide sequence portion
agcuugacaucacaggaacu

SEQ ID NO: 1294 - RNA, 20 nt, Artificial Sequence
  TRAC-targeting guide sequence portion
agcuuuucucgaccagcuug

SEQ ID NO: 1295 - RNA, 20 nt, Artificial Sequence
  TRAC-targeting guide sequence portion
aguuccugugaugucaagcu

SEQ ID NO: 1296 - RNA, 20 nt, Artificial Sequence
  TRAC-targeting guide sequence portion
augucaagcuggucgagaaa

SEQ ID NO: 1297 - RNA, 20 nt, Artificial Sequence
  TRAC-targeting guide sequence portion
caaagcuuuucucgaccagc

SEQ ID NO: 1298 - RNA, 20 nt, Artificial Sequence
  TRAC-targeting guide sequence portion
cagcuugacaucacaggaac

SEQ ID NO: 1299 - RNA, 20 nt, Artificial Sequence
  TRAC-targeting guide sequence portion
ccagcuugacaucacaggaa

SEQ ID NO: 1300 - RNA, 20 nt, Artificial Sequence
  TRAC-targeting guide sequence portion
ccuguuucaaagcuuuucuc

SEQ ID NO: 1301 - RNA, 20 nt, Artificial Sequence
  TRAC-targeting guide sequence portion
cgagaaaagcuuugaaacag

SEQ ID NO: 1302 - RNA, 20 nt, Artificial Sequence
  TRAC-targeting guide sequence portion
cuggucgagaaaagcuuuga

SEQ ID NO: 1303 - RNA, 20 nt, Artificial Sequence
  TRAC-targeting guide sequence portion
cuuaccuguuucaaagcuuu

SEQ ID NO: 1304 - RNA, 20 nt, Artificial Sequence
  TRAC-targeting guide sequence portion
cuugacaucacaggaacuuu

SEQ ID NO: 1305 - RNA, 20 nt, Artificial Sequence
  TRAC-targeting guide sequence portion
cuuuucucgaccagcuugac

SEQ ID NO: 1306 - RNA, 20 nt, Artificial Sequence
  TRAC-targeting guide sequence portion
gaccagcuugacaucacagg

SEQ ID NO: 1307 - RNA, 20 nt, Artificial Sequence
  TRAC-targeting guide sequence portion
gagaaaagcuuugaaacagg

SEQ ID NO: 1308 - RNA, 20 nt, Artificial Sequence
  TRAC-targeting guide sequence portion
gcuggucgagaaaagcuuug

SEQ ID NO: 1309 - RNA, 20 nt, Artificial Sequence
  TRAC-targeting guide sequence portion
gcuugacaucacaggaacuu

SEQ ID NO: 1310 - RNA, 20 nt, Artificial Sequence
  TRAC-targeting guide sequence portion
gcuuuucucgaccagcuuga

SEQ ID NO: 1311 - RNA, 20 nt, Artificial Sequence
  TRAC-targeting guide sequence portion
gucaagcuggucgagaaaag

SEQ ID NO: 1312 - RNA, 20 nt, Artificial Sequence
  TRAC-targeting guide sequence portion
gucuuaccuguuucaaagcu

SEQ ID NO: 1313 - RNA, 20 nt, Artificial Sequence
  TRAC-targeting guide sequence portion
guuccugugaugucaagcug

SEQ ID NO: 1314 - RNA, 20 nt, Artificial Sequence
  TRAC-targeting guide sequence portion
uaccuguuucaaagcuuuuc

SEQ ID NO: 1315 - RNA, 20 nt, Artificial Sequence
  TRAC-targeting guide sequence portion
ucaaagcuuuucucgaccag

SEQ ID NO: 1316 - RNA, 20 nt, Artificial Sequence
  TRAC-targeting guide sequence portion
ucaagcuggucgagaaaagc

SEQ ID NO: 1317 - RNA, 20 nt, Artificial Sequence
  TRAC-targeting guide sequence portion
uccugugaugucaagcuggu

SEQ ID NO: 1318 - RNA, 20 nt, Artificial Sequence
  TRAC-targeting guide sequence portion
ucuuaccuguuucaaagcuu

SEQ ID NO: 1319 - RNA, 20 nt, Artificial Sequence
  TRAC-targeting guide sequence portion
ugaugucaagcuggucgaga

SEQ ID NO: 1320 - RNA, 20 nt, Artificial Sequence
  TRAC-targeting guide sequence portion
uggucgagaaaagcuuugaa

SEQ ID NO: 1321 - RNA, 20 nt, Artificial Sequence
  TRAC-targeting guide sequence portion
ugucaagcuggucgagaaaa

SEQ ID NO: 1322 - RNA, 20 nt, Artificial Sequence
  TRAC-targeting guide sequence portion
ugugaugucaagcuggucga

SEQ ID NO: 1323 - RNA, 20 nt, Artificial Sequence
  TRAC-targeting guide sequence portion
uguuucaaagcuuuucucga

SEQ ID NO: 1324 - RNA, 20 nt, Artificial Sequence
  TRAC-targeting guide sequence portion
uuaccuguuucaaagcuuuu

SEQ ID NO: 1325 - RNA, 20 nt, Artificial Sequence
  TRAC-targeting guide sequence portion
uuagaaaguuccugugaugu

SEQ ID NO: 1326 - RNA, 20 nt, Artificial Sequence
  TRAC-targeting guide sequence portion
uucaaagcuuuucucgacca

SEQ ID NO: 1327 - RNA, 20 nt, Artificial Sequence
  TRAC-targeting guide sequence portion
uucucgaccagcuugacauc

SEQ ID NO: 1328 - RNA, 20 nt, Artificial Sequence
  TRAC-targeting guide sequence portion
uugacaucacaggaacuuuc

SEQ ID NO: 1329 - RNA, 20 nt, Artificial Sequence
  TRAC-targeting guide sequence portion
uuuagaaaguuccugugaug

SEQ ID NO: 1330 - RNA, 20 nt, Artificial Sequence
  TRAC-targeting guide sequence portion
uuucaaagcuuuucucgacc

SEQ ID NO: 1331 - RNA, 20 nt, Artificial Sequence
  TRAC-targeting guide sequence portion
uuucucgaccagcuugacau

SEQ ID NO: 1332 - RNA, 20 nt, Artificial Sequence
  TRAC-targeting guide sequence portion
uuuuagaaaguuccugugau

SEQ ID NO: 1333 - RNA, 20 nt, Artificial Sequence
  TRAC-targeting guide sequence portion
uuuucucgaccagcuugaca

SEQ ID NO: 1334 - RNA, 21 nt, Artificial Sequence
  TRAC-targeting guide sequence portion
aaaguuccugugaugucaagc

SEQ ID NO: 1335 - RNA, 21 nt, Artificial Sequence
  TRAC-targeting guide sequence portion
aagcuggucgagaaaagcuuu

SEQ ID NO: 1336 - RNA, 21 nt, Artificial Sequence
  TRAC-targeting guide sequence portion
aagcuuuucucgaccagcuug

SEQ ID NO: 1337 - RNA, 21 nt, Artificial Sequence
  TRAC-targeting guide sequence portion
aaguuccugugaugucaagcu

SEQ ID NO: 1338 - RNA, 21 nt, Artificial Sequence
  TRAC-targeting guide sequence portion
accagcuugacaucacaggaa

SEQ ID NO: 1339 - RNA, 21 nt, Artificial Sequence
  TRAC-targeting guide sequence portion
accuguuucaaagcuuuucuc

SEQ ID NO: 1340 - RNA, 21 nt, Artificial Sequence
  TRAC-targeting guide sequence portion
agcuggucgagaaaagcuuug

SEQ ID NO: 1341 - RNA, 21 nt, Artificial Sequence
  TRAC-targeting guide sequence portion
agcuugacaucacaggaacuu

SEQ ID NO: 1342 - RNA, 21 nt, Artificial Sequence
  TRAC-targeting guide sequence portion
agcuuuucucgaccagcuuga

SEQ ID NO: 1343 - RNA, 21 nt, Artificial Sequence
  TRAC-targeting guide sequence portion
aguuccugugaugucaagcug

SEQ ID NO: 1344 - RNA, 21 nt, Artificial Sequence
  TRAC-targeting guide sequence portion
augucaagcuggucgagaaaa

SEQ ID NO: 1345 - RNA, 21 nt, Artificial Sequence
  TRAC-targeting guide sequence portion
caaagcuuuucucgaccagcu

SEQ ID NO: 1346 - RNA, 21 nt, Artificial Sequence
  TRAC-targeting guide sequence portion
caagcuggucgagaaaagcuu

SEQ ID NO: 1347 - RNA, 21 nt, Artificial Sequence
  TRAC-targeting guide sequence portion
cagcuugacaucacaggaacu

SEQ ID NO: 1348 - RNA, 21 nt, Artificial Sequence
  TRAC-targeting guide sequence portion
ccagcuugacaucacaggaac

SEQ ID NO: 1349 - RNA, 21 nt, Artificial Sequence
  TRAC-targeting guide sequence portion
ccugugaugucaagcuggucg

SEQ ID NO: 1350 - RNA, 21 nt, Artificial Sequence
  TRAC-targeting guide sequence portion
ccuguuucaaagcuuuucucg

SEQ ID NO: 1351 - RNA, 21 nt, Artificial Sequence
  TRAC-targeting guide sequence portion
cgaccagcuugacaucacagg

SEQ ID NO: 1352 - RNA, 21 nt, Artificial Sequence
  TRAC-targeting guide sequence portion
cgagaaaagcuuugaaacagg

SEQ ID NO: 1353 - RNA, 21 nt, Artificial Sequence
  TRAC-targeting guide sequence portion
cuggucgagaaaagcuuugaa

SEQ ID NO: 1354 - RNA, 21 nt, Artificial Sequence
  TRAC-targeting guide sequence portion
cugugaugucaagcuggucga

SEQ ID NO: 1355 - RNA, 21 nt, Artificial Sequence
  TRAC-targeting guide sequence portion
cuguuucaaagcuuuucucga

SEQ ID NO: 1356 - RNA, 21 nt, Artificial Sequence
  TRAC-targeting guide sequence portion
cuuaccuguuucaaagcuuuu

SEQ ID NO: 1357 - RNA, 21 nt, Artificial Sequence
  TRAC-targeting guide sequence portion
cuugacaucacaggaacuuuc

SEQ ID NO: 1358 - RNA, 21 nt, Artificial Sequence
  TRAC-targeting guide sequence portion
gaccagcuugacaucacagga

SEQ ID NO: 1359 - RNA, 21 nt, Artificial Sequence
  TRAC-targeting guide sequence portion
gaugucaagcuggucgagaaa

SEQ ID NO: 1360 - RNA, 21 nt, Artificial Sequence
  TRAC-targeting guide sequence portion
gcuggucgagaaaagcuuuga

SEQ ID NO: 1361 - RNA, 21 nt, Artificial Sequence
  TRAC-targeting guide sequence portion
gcuugacaucacaggaacuuu

SEQ ID NO: 1362 - RNA, 21 nt, Artificial Sequence
  TRAC-targeting guide sequence portion
gcuuuucucgaccagcuugac

SEQ ID NO: 1363 - RNA, 21 nt, Artificial Sequence
  TRAC-targeting guide sequence portion
ggucgagaaaagcuuugaaac

SEQ ID NO: 1364 - RNA, 21 nt, Artificial Sequence
  TRAC-targeting guide sequence portion
gucaagcuggucgagaaaagc

SEQ ID NO: 1365 - RNA, 21 nt, Artificial Sequence
  TRAC-targeting guide sequence portion
gucgagaaaagcuuugaaaca

SEQ ID NO: 1366 - RNA, 21 nt, Artificial Sequence
  TRAC-targeting guide sequence portion
gucuuaccuguuucaaagcuu

SEQ ID NO: 1367 - RNA, 21 nt, Artificial Sequence
  TRAC-targeting guide sequence portion
gugaugucaagcuggucgaga

SEQ ID NO: 1368 - RNA, 21 nt, Artificial Sequence
  TRAC-targeting guide sequence portion
guuucaaagcuuuucucgacc

SEQ ID NO: 1369 - RNA, 21 nt, Artificial Sequence
  TRAC-targeting guide sequence portion
uaccuguuucaaagcuuuucu

SEQ ID NO: 1370 - RNA, 21 nt, Artificial Sequence
  TRAC-targeting guide sequence portion
uagaaaguuccugugauguca

SEQ ID NO: 1371 - RNA, 21 nt, Artificial Sequence
  TRAC-targeting guide sequence portion
ucaaagcuuuucucgaccagc

SEQ ID NO: 1372 - RNA, 21 nt, Artificial Sequence
  TRAC-targeting guide sequence portion
ucgagaaaagcuuugaaacag

SEQ ID NO: 1373 - RNA, 21 nt, Artificial Sequence
  TRAC-targeting guide sequence portion
ucuuaccuguuucaaagcuuu

SEQ ID NO: 1374 - RNA, 21 nt, Artificial Sequence
  TRAC-targeting guide sequence portion
ugaugucaagcuggucgagaa

SEQ ID NO: 1375 - RNA, 21 nt, Artificial Sequence
  TRAC-targeting guide sequence portion
uggucgagaaaagcuuugaaa

SEQ ID NO: 1376 - RNA, 21 nt, Artificial Sequence
  TRAC-targeting guide sequence portion
ugugaugucaagcuggucgag

SEQ ID NO: 1377 - RNA, 21 nt, Artificial Sequence
  TRAC-targeting guide sequence portion
uuaccuguuucaaagcuuuuc

SEQ ID NO: 1378 - RNA, 21 nt, Artificial Sequence
  TRAC-targeting guide sequence portion
uuagaaaguuccugugauguc

SEQ ID NO: 1379 - RNA, 21 nt, Artificial Sequence
  TRAC-targeting guide sequence portion
uucaaagcuuuucucgaccag

SEQ ID NO: 1380 - RNA, 21 nt, Artificial Sequence
  TRAC-targeting guide sequence portion
uuccugugaugucaagcuggu

SEQ ID NO: 1381 - RNA, 21 nt, Artificial Sequence
  TRAC-targeting guide sequence portion
uuuagaaaguuccugugaugu

SEQ ID NO: 1382 - RNA, 21 nt, Artificial Sequence
  TRAC-targeting guide sequence portion
uuucucgaccagcuugacauc

SEQ ID NO: 1383 - RNA, 21 nt, Artificial Sequence
  TRAC-targeting guide sequence portion
uuuuagaaaguuccugugaug

SEQ ID NO: 1384 - RNA, 21 nt, Artificial Sequence
  TRAC-targeting guide sequence portion
uuuucucgaccagcuugacau

SEQ ID NO: 1385 - RNA, 22 nt, Artificial Sequence
  TRAC-targeting guide sequence portion
aaaguuccugugaugucaagcu

SEQ ID NO: 1386 - RNA, 22 nt, Artificial Sequence
  TRAC-targeting guide sequence portion
aagcuggucgagaaaagcuuug

SEQ ID NO: 1387 - RNA, 22 nt, Artificial Sequence
  TRAC-targeting guide sequence portion
aagcuuuucucgaccagcuuga

SEQ ID NO: 1388 - RNA, 22 nt, Artificial Sequence
  TRAC-targeting guide sequence portion
aaguuccugugaugucaagcug

SEQ ID NO: 1389 - RNA, 22 nt, Artificial Sequence
  TRAC-targeting guide sequence portion
accagcuugacaucacaggaac

SEQ ID NO: 1390 - RNA, 22 nt, Artificial Sequence
  TRAC-targeting guide sequence portion
accuguuucaaagcuuuucucg

SEQ ID NO: 1391 - RNA, 22 nt, Artificial Sequence
  TRAC-targeting guide sequence portion
agcuggucgagaaaagcuuuga

SEQ ID NO: 1392 - RNA, 22 nt, Artificial Sequence
  TRAC-targeting guide sequence portion
agcuugacaucacaggaacuuu

SEQ ID NO: 1393 - RNA, 22 nt, Artificial Sequence
  TRAC-targeting guide sequence portion
agcuuuucucgaccagcuugac

SEQ ID NO: 1394 - RNA, 22 nt, Artificial Sequence
  TRAC-targeting guide sequence portion
augucaagcuggucgagaaaag

SEQ ID NO: 1395 - RNA, 22 nt, Artificial Sequence
  TRAC-targeting guide sequence portion
caaagcuuuucucgaccagcuu

SEQ ID NO: 1396 - RNA, 22 nt, Artificial Sequence
  TRAC-targeting guide sequence portion
caagcuggucgagaaaagcuuu

SEQ ID NO: 1397 - RNA, 22 nt, Artificial Sequence
  TRAC-targeting guide sequence portion
cagcuugacaucacaggaacuu

SEQ ID NO: 1398 - RNA, 22 nt, Artificial Sequence
  TRAC-targeting guide sequence portion
ccagcuugacaucacaggaacu

SEQ ID NO: 1399 - RNA, 22 nt, Artificial Sequence
  TRAC-targeting guide sequence portion
ccugugaugucaagcuggucga

SEQ ID NO: 1400 - RNA, 22 nt, Artificial Sequence
  TRAC-targeting guide sequence portion
ccuguuucaaagcuuuucucga

SEQ ID NO: 1401 - RNA, 22 nt, Artificial Sequence
  TRAC-targeting guide sequence portion
cgaccagcuugacaucacagga

SEQ ID NO: 1402 - RNA, 22 nt, Artificial Sequence
  TRAC-targeting guide sequence portion
cuggucgagaaaagcuuugaaa

SEQ ID NO: 1403 - RNA, 22 nt, Artificial Sequence
  TRAC-targeting guide sequence portion
cugugaugucaagcuggucgag

SEQ ID NO: 1404 - RNA, 22 nt, Artificial Sequence
  TRAC-targeting guide sequence portion
cuguuucaaagcuuuucucgac

SEQ ID NO: 1405 - RNA, 22 nt, Artificial Sequence
  TRAC-targeting guide sequence portion
cuuaccuguuucaaagcuuuuc

SEQ ID NO: 1406 - RNA, 22 nt, Artificial Sequence
  TRAC-targeting guide sequence portion
cuuuucucgaccagcuugacau

SEQ ID NO: 1407 - RNA, 22 nt, Artificial Sequence
  TRAC-targeting guide sequence portion
gaccagcuugacaucacaggaa

SEQ ID NO: 1408 - RNA, 22 nt, Artificial Sequence
  TRAC-targeting guide sequence portion
gaugucaagcuggucgagaaaa

SEQ ID NO: 1409 - RNA, 22 nt, Artificial Sequence
  TRAC-targeting guide sequence portion
gcuggucgagaaaagcuuugaa

SEQ ID NO: 1410 - RNA, 22 nt, Artificial Sequence
  TRAC-targeting guide sequence portion
gcuugacaucacaggaacuuuc

SEQ ID NO: 1411 - RNA, 22 nt, Artificial Sequence
  TRAC-targeting guide sequence portion
gcuuuucucgaccagcuugaca

SEQ ID NO: 1412 - RNA, 22 nt, Artificial Sequence
  TRAC-targeting guide sequence portion
ggucgagaaaagcuuugaaaca

SEQ ID NO: 1413 - RNA, 22 nt, Artificial Sequence
  TRAC-targeting guide sequence portion
gucgagaaaagcuuugaaacag

SEQ ID NO: 1414 - RNA, 22 nt, Artificial Sequence
  TRAC-targeting guide sequence portion
gucuuaccuguuucaaagcuuu

SEQ ID NO: 1415 - RNA, 22 nt, Artificial Sequence
  TRAC-targeting guide sequence portion
gugaugucaagcuggucgagaa

SEQ ID NO: 1416 - RNA, 22 nt, Artificial Sequence
  TRAC-targeting guide sequence portion
guuccugugaugucaagcuggu

SEQ ID NO: 1417 - RNA, 22 nt, Artificial Sequence
  TRAC-targeting guide sequence portion
guuucaaagcuuuucucgacca

SEQ ID NO: 1418 - RNA, 22 nt, Artificial Sequence
  TRAC-targeting guide sequence portion
uaccuguuucaaagcuuuucuc

SEQ ID NO: 1419 - RNA, 22 nt, Artificial Sequence
  TRAC-targeting guide sequence portion
uagaaaguuccugugaugucaa

SEQ ID NO: 1420 - RNA, 22 nt, Artificial Sequence
  TRAC-targeting guide sequence portion
ucaaagcuuuucucgaccagcu

SEQ ID NO: 1421 - RNA, 22 nt, Artificial Sequence
  TRAC-targeting guide sequence portion
ucaagcuggucgagaaaagcuu

SEQ ID NO: 1422 - RNA, 22 nt, Artificial Sequence
  TRAC-targeting guide sequence portion
uccugugaugucaagcuggucg

SEQ ID NO: 1423 - RNA, 22 nt, Artificial Sequence
  TRAC-targeting guide sequence portion
ucgagaaaagcuuugaaacagg

SEQ ID NO: 1424 - RNA, 22 nt, Artificial Sequence
  TRAC-targeting guide sequence portion
ucucgaccagcuugacaucaca

SEQ ID NO: 1425 - RNA, 22 nt, Artificial Sequence
  TRAC-targeting guide sequence portion
ucuuaccuguuucaaagcuuuu

SEQ ID NO: 1426 - RNA, 22 nt, Artificial Sequence
  TRAC-targeting guide sequence portion
ugaugucaagcuggucgagaaa

SEQ ID NO: 1427 - RNA, 22 nt, Artificial Sequence
  TRAC-targeting guide sequence portion
uggucgagaaaagcuuugaaac

SEQ ID NO: 1428 - RNA, 22 nt, Artificial Sequence
  TRAC-targeting guide sequence portion
ugucaagcuggucgagaaaagc

SEQ ID NO: 1429 - RNA, 22 nt, Artificial Sequence
  TRAC-targeting guide sequence portion
ugugaugucaagcuggucgaga

SEQ ID NO: 1430 - RNA, 22 nt, Artificial Sequence
  TRAC-targeting guide sequence portion
uguuucaaagcuuuucucgacc

SEQ ID NO: 1431 - RNA, 22 nt, Artificial Sequence
  TRAC-targeting guide sequence portion
uuaccuguuucaaagcuuuucu

SEQ ID NO: 1432 - RNA, 22 nt, Artificial Sequence
  TRAC-targeting guide sequence portion
uuagaaaguuccugugauguca

SEQ ID NO: 1433 - RNA, 22 nt, Artificial Sequence
  TRAC-targeting guide sequence portion
uucaaagcuuuucucgaccagc

SEQ ID NO: 1434 - RNA, 22 nt, Artificial Sequence
  TRAC-targeting guide sequence portion
uuuagaaaguuccugugauguc

SEQ ID NO: 1435 - RNA, 22 nt, Artificial Sequence
  TRAC-targeting guide sequence portion
uuucaaagcuuuucucgaccag

SEQ ID NO: 1436 - RNA, 22 nt, Artificial Sequence
  TRAC-targeting guide sequence portion
uuuuagaaaguuccugugaugu

SEQ ID NO: 1437 - RNA, 22 nt, Artificial Sequence
  TRAC-targeting guide sequence portion
uuuucucgaccagcuugacauc

SEQ ID NO: 1438 - RNA, 20 nt, Artificial Sequence
  TRAC-targeting guide sequence portion
aaaccugucagugauugggu

SEQ ID NO: 1439 - RNA, 20 nt, Artificial Sequence
  TRAC-targeting guide sequence portion
aaacuuucaaaaccugucag

SEQ ID NO: 1440 - RNA, 20 nt, Artificial Sequence
  TRAC-targeting guide sequence portion
aaaguggccggguuuaaucu

SEQ ID NO: 1441 - RNA, 20 nt, Artificial Sequence
  TRAC-targeting guide sequence portion
aaccuaaacuuucaaaaccu

SEQ ID NO: 1442 - RNA, 20 nt, Artificial Sequence
  TRAC-targeting guide sequence portion
aacuuucaaaaccugucagu

SEQ ID NO: 1443 - RNA, 20 nt, Artificial Sequence
  TRAC-targeting guide sequence portion
aaguggccggguuuaaucug

SEQ ID NO: 1444 - RNA, 20 nt, Artificial Sequence
  TRAC-targeting guide sequence portion
aaucacugacagguuuugaa

SEQ ID NO: 1445 - RNA, 20 nt, Artificial Sequence
  TRAC-targeting guide sequence portion
aaucugcucaugacgcugcg

SEQ ID NO: 1446 - RNA, 20 nt, Artificial Sequence
  TRAC-targeting guide sequence portion
acagguuuugaaaguuuagg

SEQ ID NO: 1447 - RNA, 20 nt, Artificial Sequence
  TRAC-targeting guide sequence portion
acccaaucacugacagguuu

SEQ ID NO: 1448 - RNA, 20 nt, Artificial Sequence
  TRAC-targeting guide sequence portion
accuaaacuuucaaaaccug

SEQ ID NO: 1449 - RNA, 20 nt, Artificial Sequence
  TRAC-targeting guide sequence portion
accucagcuggaccacagcc

SEQ ID NO: 1450 - RNA, 20 nt, Artificial Sequence
  TRAC-targeting guide sequence portion
accugucagugauuggguuc

SEQ ID NO: 1451 - RNA, 20 nt, Artificial Sequence
  TRAC-targeting guide sequence portion
acgaaccuaaacuuucaaaa

SEQ ID NO: 1452 - RNA, 20 nt, Artificial Sequence
  TRAC-targeting guide sequence portion
acugacagguuuugaaaguu

SEQ ID NO: 1453 - RNA, 20 nt, Artificial Sequence
  TRAC-targeting guide sequence portion
acuuucaaaaccugucagug

SEQ ID NO: 1454 - RNA, 20 nt, Artificial Sequence
  TRAC-targeting guide sequence portion
acuuucaggaggaggauucg

SEQ ID NO: 1455 - RNA, 20 nt, Artificial Sequence
  TRAC-targeting guide sequence portion
agauacgaaccuaaacuuuc

SEQ ID NO: 1456 - RNA, 20 nt, Artificial Sequence
  TRAC-targeting guide sequence portion
agcagauuaaacccggccac

SEQ ID NO: 1457 - RNA, 20 nt, Artificial Sequence
  TRAC-targeting guide sequence portion
agccgcagcgucaugagcag

SEQ ID NO: 1458 - RNA, 20 nt, Artificial Sequence
  TRAC-targeting guide sequence portion
agcgucaugagcagauuaaa

SEQ ID NO: 1459 - RNA, 20 nt, Artificial Sequence
  TRAC-targeting guide sequence portion
agcuggaccacagccgcagc

SEQ ID NO: 1460 - RNA, 20 nt, Artificial Sequence
  TRAC-targeting guide sequence portion
aggaggauucggaacccaau

SEQ ID NO: 1461 - RNA, 20 nt, Artificial Sequence
  TRAC-targeting guide sequence portion
aggauucggaacccaaucac

SEQ ID NO: 1462 - RNA, 20 nt, Artificial Sequence
  TRAC-targeting guide sequence portion
agguuuugaaaguuuagguu

SEQ ID NO: 1463 - RNA, 20 nt, Artificial Sequence
  TRAC-targeting guide sequence portion
agugauuggguuccgaaucc

SEQ ID NO: 1464 - RNA, 20 nt, Artificial Sequence
  TRAC-targeting guide sequence portion
aguggccggguuuaaucugc

SEQ ID NO: 1465 - RNA, 20 nt, Artificial Sequence
  TRAC-targeting guide sequence portion
auacgaaccuaaacuuucaa

SEQ ID NO: 1466 - RNA, 20 nt, Artificial Sequence
  TRAC-targeting guide sequence portion
aucacugacagguuuugaaa

SEQ ID NO: 1467 - RNA, 20 nt, Artificial Sequence
  TRAC-targeting guide sequence portion
augagcagauuaaacccggc

SEQ ID NO: 1468 - RNA, 20 nt, Artificial Sequence
  TRAC-targeting guide sequence portion
auuggguuccgaauccuccu

SEQ ID NO: 1469 - RNA, 20 nt, Artificial Sequence
  TRAC-targeting guide sequence portion
caaaaccugucagugauugg

SEQ ID NO: 1470 - RNA, 20 nt, Artificial Sequence
  TRAC-targeting guide sequence portion
caaucacugacagguuuuga

SEQ ID NO: 1471 - RNA, 20 nt, Artificial Sequence
  TRAC-targeting guide sequence portion
cacagccgcagcgucaugag

SEQ ID NO: 1472 - RNA, 20 nt, Artificial Sequence
  TRAC-targeting guide sequence portion
caccucagcuggaccacagc

SEQ ID NO: 1473 - RNA, 20 nt, Artificial Sequence
  TRAC-targeting guide sequence portion
cacugacagguuuugaaagu

SEQ ID NO: 1474 - RNA, 20 nt, Artificial Sequence
  TRAC-targeting guide sequence portion
cacuuucaggaggaggauuc

SEQ ID NO: 1475 - RNA, 20 nt, Artificial Sequence
  TRAC-targeting guide sequence portion
cagauuaaacccggccacuu

SEQ ID NO: 1476 - RNA, 20 nt, Artificial Sequence
  TRAC-targeting guide sequence portion
cagccgcagcgucaugagca

SEQ ID NO: 1477 - RNA, 20 nt, Artificial Sequence
  TRAC-targeting guide sequence portion
cagcgucaugagcagauuaa

SEQ ID NO: 1478 - RNA, 20 nt, Artificial Sequence
  TRAC-targeting guide sequence portion
cagcuggaccacagccgcag

SEQ ID NO: 1479 - RNA, 20 nt, Artificial Sequence
  TRAC-targeting guide sequence portion
caggaggaggauucggaacc

SEQ ID NO: 1480 - RNA, 20 nt, Artificial Sequence
  TRAC-targeting guide sequence portion
cagguuuugaaaguuuaggu

SEQ ID NO: 1481 - RNA, 20 nt, Artificial Sequence
  TRAC-targeting guide sequence portion
cagugauuggguuccgaauc

SEQ ID NO: 1482 - RNA, 20 nt, Artificial Sequence
  TRAC-targeting guide sequence portion
caugacgcugcggcuguggu

SEQ ID NO: 1483 - RNA, 20 nt, Artificial Sequence
  TRAC-targeting guide sequence portion
caugagcagauuaaacccgg

SEQ ID NO: 1484 - RNA, 20 nt, Artificial Sequence
  TRAC-targeting guide sequence portion
ccaaucacugacagguuuug

SEQ ID NO: 1485 - RNA, 20 nt, Artificial Sequence
  TRAC-targeting guide sequence portion
ccacagccgcagcgucauga

SEQ ID NO: 1486 - RNA, 20 nt, Artificial Sequence
  TRAC-targeting guide sequence portion
cccaaucacugacagguuuu

SEQ ID NO: 1487 - RNA, 20 nt, Artificial Sequence
  TRAC-targeting guide sequence portion
cccucaccucagcuggacca

SEQ ID NO: 1488 - RNA, 20 nt, Artificial Sequence
  TRAC-targeting guide sequence portion
ccgcagcgucaugagcagau

SEQ ID NO: 1489 - RNA, 20 nt, Artificial Sequence
  TRAC-targeting guide sequence portion
ccggccacuuucaggaggag

SEQ ID NO: 1490 - RNA, 20 nt, Artificial Sequence
  TRAC-targeting guide sequence portion
ccggguuuaaucugcucaug

SEQ ID NO: 1491 - RNA, 20 nt, Artificial Sequence
  TRAC-targeting guide sequence portion
ccucaccucagcuggaccac

SEQ ID NO: 1492 - RNA, 20 nt, Artificial Sequence
  TRAC-targeting guide sequence portion
ccucagcuggaccacagccg

SEQ ID NO: 1493 - RNA, 20 nt, Artificial Sequence
  TRAC-targeting guide sequence portion
ccuccuccugaaaguggccg

SEQ ID NO: 1494 - RNA, 20 nt, Artificial Sequence
  TRAC-targeting guide sequence portion
ccuccugaaaguggccgggu

SEQ ID NO: 1495 - RNA, 20 nt, Artificial Sequence
  TRAC-targeting guide sequence portion
ccugaaaguggccggguuua

SEQ ID NO: 1496 - RNA, 20 nt, Artificial Sequence
  TRAC-targeting guide sequence portion
ccugucagugauuggguucc

SEQ ID NO: 1497 - RNA, 20 nt, Artificial Sequence
  TRAC-targeting guide sequence portion
cgaaccuaaacuuucaaaac

SEQ ID NO: 1498 - RNA, 20 nt, Artificial Sequence
  TRAC-targeting guide sequence portion
cgaauccuccuccugaaagu

SEQ ID NO: 1499 - RNA, 20 nt, Artificial Sequence
  TRAC-targeting guide sequence portion
cgcagcgucaugagcagauu

SEQ ID NO: 1500 - RNA, 20 nt, Artificial Sequence
  TRAC-targeting guide sequence portion
cggaacccaaucacugacag

SEQ ID NO: 1501 - RNA, 20 nt, Artificial Sequence
  TRAC-targeting guide sequence portion
cggccacuuucaggaggagg

SEQ ID NO: 1502 - RNA, 20 nt, Artificial Sequence
  TRAC-targeting guide sequence portion
cggcugugguccagcugagg

SEQ ID NO: 1503 - RNA, 20 nt, Artificial Sequence
  TRAC-targeting guide sequence portion
cggguuuaaucugcucauga

SEQ ID NO: 1504 - RNA, 20 nt, Artificial Sequence
  TRAC-targeting guide sequence portion
cuaaacuuucaaaaccuguc

SEQ ID NO: 1505 - RNA, 20 nt, Artificial Sequence
  TRAC-targeting guide sequence portion
cucaccucagcuggaccaca

SEQ ID NO: 1506 - RNA, 20 nt, Artificial Sequence
  TRAC-targeting guide sequence portion
cucagcuggaccacagccgc

SEQ ID NO: 1507 - RNA, 20 nt, Artificial Sequence
  TRAC-targeting guide sequence portion
cucaugacgcugcggcugug

SEQ ID NO: 1508 - RNA, 20 nt, Artificial Sequence
  TRAC-targeting guide sequence portion
cuccuccugaaaguggccgg

SEQ ID NO: 1509 - RNA, 20 nt, Artificial Sequence
  TRAC-targeting guide sequence portion
cuccugaaaguggccggguu

SEQ ID NO: 1510 - RNA, 20 nt, Artificial Sequence
  TRAC-targeting guide sequence portion
cugaaaguggccggguuuaa

SEQ ID NO: 1511 - RNA, 20 nt, Artificial Sequence
  TRAC-targeting guide sequence portion
cugcucaugacgcugcggcu

SEQ ID NO: 1512 - RNA, 20 nt, Artificial Sequence
  TRAC-targeting guide sequence portion
cuggaccacagccgcagcgu

SEQ ID NO: 1513 - RNA, 20 nt, Artificial Sequence
  TRAC-targeting guide sequence portion
cugucagugauuggguuccg

SEQ ID NO: 1514 - RNA, 20 nt, Artificial Sequence
  TRAC-targeting guide sequence portion
cuuucaggaggaggauucgg

SEQ ID NO: 1515 - RNA, 20 nt, Artificial Sequence
  TRAC-targeting guide sequence portion
gaaaguggccggguuuaauc

SEQ ID NO: 1516 - RNA, 20 nt, Artificial Sequence
  TRAC-targeting guide sequence portion
gaacccaaucacugacaggu

SEQ ID NO: 1517 - RNA, 20 nt, Artificial Sequence
  TRAC-targeting guide sequence portion
gaaccuaaacuuucaaaacc

SEQ ID NO: 1518 - RNA, 20 nt, Artificial Sequence
  TRAC-targeting guide sequence portion
gaauccuccuccugaaagug

SEQ ID NO: 1519 - RNA, 20 nt, Artificial Sequence
  TRAC-targeting guide sequence portion
gacagguuuugaaaguuuag

SEQ ID NO: 1520 - RNA, 20 nt, Artificial Sequence
  TRAC-targeting guide sequence portion
gacgcugcggcuguggucca

SEQ ID NO: 1521 - RNA, 20 nt, Artificial Sequence
  TRAC-targeting guide sequence portion
gagcagauuaaacccggcca

SEQ ID NO: 1522 - RNA, 20 nt, Artificial Sequence
  TRAC-targeting guide sequence portion
gaggaggauucggaacccaa

SEQ ID NO: 1523 - RNA, 20 nt, Artificial Sequence
  TRAC-targeting guide sequence portion
gaggauucggaacccaauca

SEQ ID NO: 1524 - RNA, 20 nt, Artificial Sequence
  TRAC-targeting guide sequence portion
gauacgaaccuaaacuuuca

SEQ ID NO: 1525 - RNA, 20 nt, Artificial Sequence
  TRAC-targeting guide sequence portion
gauucggaacccaaucacug

SEQ ID NO: 1526 - RNA, 20 nt, Artificial Sequence
  TRAC-targeting guide sequence portion
gauuggguuccgaauccucc

SEQ ID NO: 1527 - RNA, 20 nt, Artificial Sequence
  TRAC-targeting guide sequence portion
gcagauuaaacccggccacu

SEQ ID NO: 1528 - RNA, 20 nt, Artificial Sequence
  TRAC-targeting guide sequence portion
gcagcgucaugagcagauua

SEQ ID NO: 1529 - RNA, 20 nt, Artificial Sequence
  TRAC-targeting guide sequence portion
gccgcagcgucaugagcaga

SEQ ID NO: 1530 - RNA, 20 nt, Artificial Sequence
  TRAC-targeting guide sequence portion
gccggguuuaaucugcucau

SEQ ID NO: 1531 - RNA, 20 nt, Artificial Sequence
  TRAC-targeting guide sequence portion
gcgucaugagcagauuaaac

SEQ ID NO: 1532 - RNA, 20 nt, Artificial Sequence
  TRAC-targeting guide sequence portion
gcucaugacgcugcggcugu

SEQ ID NO: 1533 - RNA, 20 nt, Artificial Sequence
  TRAC-targeting guide sequence portion
gcugcggcugugguccagcu

SEQ ID NO: 1534 - RNA, 20 nt, Artificial Sequence
  TRAC-targeting guide sequence portion
gcuggaccacagccgcagcg

SEQ ID NO: 1535 - RNA, 20 nt, Artificial Sequence
  TRAC-targeting guide sequence portion
ggaacccaaucacugacagg

SEQ ID NO: 1536 - RNA, 20 nt, Artificial Sequence
  TRAC-targeting guide sequence portion
ggaccacagccgcagcguca

SEQ ID NO: 1537 - RNA, 20 nt, Artificial Sequence
  TRAC-targeting guide sequence portion
ggaggaggauucggaaccca

SEQ ID NO: 1538 - RNA, 20 nt, Artificial Sequence
  TRAC-targeting guide sequence portion
ggaggauucggaacccaauc

SEQ ID NO: 1539 - RNA, 20 nt, Artificial Sequence
  TRAC-targeting guide sequence portion
ggauucggaacccaaucacu

SEQ ID NO: 1540 - RNA, 20 nt, Artificial Sequence
  TRAC-targeting guide sequence portion
ggccacuuucaggaggagga

SEQ ID NO: 1541 - RNA, 20 nt, Artificial Sequence
  TRAC-targeting guide sequence portion
ggccggguuuaaucugcuca

SEQ ID NO: 1542 - RNA, 20 nt, Artificial Sequence
  TRAC-targeting guide sequence portion
ggguuccgaauccuccuccu

SEQ ID NO: 1543 - RNA, 20 nt, Artificial Sequence
  TRAC-targeting guide sequence portion
ggguuuaaucugcucaugac

SEQ ID NO: 1544 - RNA, 20 nt, Artificial Sequence
  TRAC-targeting guide sequence portion
gguuccgaauccuccuccug

SEQ ID NO: 1545 - RNA, 20 nt, Artificial Sequence
  TRAC-targeting guide sequence portion
gguuuaaucugcucaugacg

SEQ ID NO: 1546 - RNA, 20 nt, Artificial Sequence
  TRAC-targeting guide sequence portion
gguuuugaaaguuuagguuc

SEQ ID NO: 1547 - RNA, 20 nt, Artificial Sequence
  TRAC-targeting guide sequence portion
gucagugauuggguuccgaa

SEQ ID NO: 1548 - RNA, 20 nt, Artificial Sequence
  TRAC-targeting guide sequence portion
gucaugagcagauuaaaccc

SEQ ID NO: 1549 - RNA, 20 nt, Artificial Sequence
  TRAC-targeting guide sequence portion
gugauuggguuccgaauccu

SEQ ID NO: 1550 - RNA, 20 nt, Artificial Sequence
  TRAC-targeting guide sequence portion
guggccggguuuaaucugcu

SEQ ID NO: 1551 - RNA, 20 nt, Artificial Sequence
  TRAC-targeting guide sequence portion
guuuaaucugcucaugacgc

SEQ ID NO: 1552 - RNA, 20 nt, Artificial Sequence
  TRAC-targeting guide sequence portion
guuuugaaaguuuagguucg

SEQ ID NO: 1553 - RNA, 20 nt, Artificial Sequence
  TRAC-targeting guide sequence portion
uaaacuuucaaaaccuguca

SEQ ID NO: 1554 - RNA, 20 nt, Artificial Sequence
  TRAC-targeting guide sequence portion
uaaucugcucaugacgcugc

SEQ ID NO: 1555 - RNA, 20 nt, Artificial Sequence
  TRAC-targeting guide sequence portion
uacagauacgaaccuaaacu

SEQ ID NO: 1556 - RNA, 20 nt, Artificial Sequence
  TRAC-targeting guide sequence portion
ucaaaaccugucagugauug

SEQ ID NO: 1557 - RNA, 20 nt, Artificial Sequence
  TRAC-targeting guide sequence portion
ucaccucagcuggaccacag

SEQ ID NO: 1558 - RNA, 20 nt, Artificial Sequence
  TRAC-targeting guide sequence portion
ucacugacagguuuugaaag

SEQ ID NO: 1559 - RNA, 20 nt, Artificial Sequence
  TRAC-targeting guide sequence portion
ucagcuggaccacagccgca

SEQ ID NO: 1560 - RNA, 20 nt, Artificial Sequence
  TRAC-targeting guide sequence portion
ucaggaggaggauucggaac

SEQ ID NO: 1561 - RNA, 20 nt, Artificial Sequence
  TRAC-targeting guide sequence portion
ucagugauuggguuccgaau

SEQ ID NO: 1562 - RNA, 20 nt, Artificial Sequence
  TRAC-targeting guide sequence portion
ucaugacgcugcggcugugg

SEQ ID NO: 1563 - RNA, 20 nt, Artificial Sequence
  TRAC-targeting guide sequence portion
uccgaauccuccuccugaaa

SEQ ID NO: 1564 - RNA, 20 nt, Artificial Sequence
  TRAC-targeting guide sequence portion
uccuccugaaaguggccggg

SEQ ID NO: 1565 - RNA, 20 nt, Artificial Sequence
  TRAC-targeting guide sequence portion
uccugaaaguggccggguuu

SEQ ID NO: 1566 - RNA, 20 nt, Artificial Sequence
  TRAC-targeting guide sequence portion
ucggaacccaaucacugaca

SEQ ID NO: 1567 - RNA, 20 nt, Artificial Sequence
  TRAC-targeting guide sequence portion
ucugcucaugacgcugcggc

SEQ ID NO: 1568 - RNA, 20 nt, Artificial Sequence
  TRAC-targeting guide sequence portion
ugaaaguggccggguuuaau

SEQ ID NO: 1569 - RNA, 20 nt, Artificial Sequence
  TRAC-targeting guide sequence portion
ugaaaguuuagguucguauc

SEQ ID NO: 1570 - RNA, 20 nt, Artificial Sequence
  TRAC-targeting guide sequence portion
ugacagguuuugaaaguuua

SEQ ID NO: 1571 - RNA, 20 nt, Artificial Sequence
  TRAC-targeting guide sequence portion
ugacgcugcggcuguggucc

SEQ ID NO: 1572 - RNA, 20 nt, Artificial Sequence
  TRAC-targeting guide sequence portion
ugagcagauuaaacccggcc

SEQ ID NO: 1573 - RNA, 20 nt, Artificial Sequence
  TRAC-targeting guide sequence portion
ugauuggguuccgaauccuc

SEQ ID NO: 1574 - RNA, 20 nt, Artificial Sequence
  TRAC-targeting guide sequence portion
ugcggcugugguccagcuga

SEQ ID NO: 1575 - RNA, 20 nt, Artificial Sequence
  TRAC-targeting guide sequence portion
uggccggguuuaaucugcuc

SEQ ID NO: 1576 - RNA, 20 nt, Artificial Sequence
  TRAC-targeting guide sequence portion
uggguuccgaauccuccucc

SEQ ID NO: 1577 - RNA, 20 nt, Artificial Sequence
  TRAC-targeting guide sequence portion
ugucagugauuggguuccga

SEQ ID NO: 1578 - RNA, 20 nt, Artificial Sequence
  TRAC-targeting guide sequence portion
uuacagauacgaaccuaaac

SEQ ID NO: 1579 - RNA, 20 nt, Artificial Sequence
  TRAC-targeting guide sequence portion
uucaggaggaggauucggaa

SEQ ID NO: 1580 - RNA, 20 nt, Artificial Sequence
  TRAC-targeting guide sequence portion
uuccgaauccuccuccugaa

SEQ ID NO: 1581 - RNA, 20 nt, Artificial Sequence
  TRAC-targeting guide sequence portion
uugaaaguuuagguucguau

SEQ ID NO: 1582 - RNA, 20 nt, Artificial Sequence
  TRAC-targeting guide sequence portion
uuuaaucugcucaugacgcu

SEQ ID NO: 1583 - RNA, 20 nt, Artificial Sequence
  TRAC-targeting guide sequence portion
uuuacagauacgaaccuaaa

SEQ ID NO: 1584 - RNA, 20 nt, Artificial Sequence
  TRAC-targeting guide sequence portion
uuucaggaggaggauucgga

SEQ ID NO: 1585 - RNA, 20 nt, Artificial Sequence
  TRAC-targeting guide sequence portion
uuugaaaguuuagguucgua

SEQ ID NO: 1586 - RNA, 20 nt, Artificial Sequence
  TRAC-targeting guide sequence portion
uuuugaaaguuuagguucgu

SEQ ID NO: 1587 - RNA, 21 nt, Artificial Sequence
  TRAC-targeting guide sequence portion
aaacuuucaaaaccugucagu

SEQ ID NO: 1588 - RNA, 21 nt, Artificial Sequence
  TRAC-targeting guide sequence portion
aaaguggccggguuuaaucug

SEQ ID NO: 1589 - RNA, 21 nt, Artificial Sequence
  TRAC-targeting guide sequence portion
aacccaaucacugacagguuu

SEQ ID NO: 1590 - RNA, 21 nt, Artificial Sequence
  TRAC-targeting guide sequence portion
aacccggccacuuucaggagg

SEQ ID NO: 1591 - RNA, 21 nt, Artificial Sequence
  TRAC-targeting guide sequence portion
aaccuaaacuuucaaaaccug

SEQ ID NO: 1592 - RNA, 21 nt, Artificial Sequence
  TRAC-targeting guide sequence portion
aaccugucagugauuggguuc

SEQ ID NO: 1593 - RNA, 21 nt, Artificial Sequence
  TRAC-targeting guide sequence portion
aacuuucaaaaccugucagug

SEQ ID NO: 1594 - RNA, 21 nt, Artificial Sequence
  TRAC-targeting guide sequence portion
aaguggccggguuuaaucugc

SEQ ID NO: 1595 - RNA, 21 nt, Artificial Sequence
  TRAC-targeting guide sequence portion
aaucacugacagguuuugaaa

SEQ ID NO: 1596 - RNA, 21 nt, Artificial Sequence
  TRAC-targeting guide sequence portion
aauccuccuccugaaaguggc

SEQ ID NO: 1597 - RNA, 21 nt, Artificial Sequence
  TRAC-targeting guide sequence portion
aaucugcucaugacgcugcgg

SEQ ID NO: 1598 - RNA, 21 nt, Artificial Sequence
  TRAC-targeting guide sequence portion
acagccgcagcgucaugagca

SEQ ID NO: 1599 - RNA, 21 nt, Artificial Sequence
  TRAC-targeting guide sequence portion
acagguuuugaaaguuuaggu

SEQ ID NO: 1600 - RNA, 21 nt, Artificial Sequence
  TRAC-targeting guide sequence portion
accacagccgcagcgucauga

SEQ ID NO: 1601 - RNA, 21 nt, Artificial Sequence
  TRAC-targeting guide sequence portion
acccaaucacugacagguuuu

SEQ ID NO: 1602 - RNA, 21 nt, Artificial Sequence
  TRAC-targeting guide sequence portion
acccggccacuuucaggagga

SEQ ID NO: 1603 - RNA, 21 nt, Artificial Sequence
  TRAC-targeting guide sequence portion
accuaaacuuucaaaaccugu

SEQ ID NO: 1604 - RNA, 21 nt, Artificial Sequence
  TRAC-targeting guide sequence portion
accucagcuggaccacagccg

SEQ ID NO: 1605 - RNA, 21 nt, Artificial Sequence
  TRAC-targeting guide sequence portion
accugucagugauuggguucc

SEQ ID NO: 1606 - RNA, 21 nt, Artificial Sequence
  TRAC-targeting guide sequence portion
acgaaccuaaacuuucaaaac

SEQ ID NO: 1607 - RNA, 21 nt, Artificial Sequence
  TRAC-targeting guide sequence portion
acgcugcggcugugguccagc

SEQ ID NO: 1608 - RNA, 21 nt, Artificial Sequence
  TRAC-targeting guide sequence portion
acugacagguuuugaaaguuu

SEQ ID NO: 1609 - RNA, 21 nt, Artificial Sequence
  TRAC-targeting guide sequence portion
acuuucaggaggaggauucgg

SEQ ID NO: 1610 - RNA, 21 nt, Artificial Sequence
  TRAC-targeting guide sequence portion
agauacgaaccuaaacuuuca

SEQ ID NO: 1611 - RNA, 21 nt, Artificial Sequence
  TRAC-targeting guide sequence portion
agcagauuaaacccggccacu

SEQ ID NO: 1612 - RNA, 21 nt, Artificial Sequence
  TRAC-targeting guide sequence portion
agccgcagcgucaugagcaga

SEQ ID NO: 1613 - RNA, 21 nt, Artificial Sequence
  TRAC-targeting guide sequence portion
agcgucaugagcagauuaaac

SEQ ID NO: 1614 - RNA, 21 nt, Artificial Sequence
  TRAC-targeting guide sequence portion
agcuggaccacagccgcagcg

SEQ ID NO: 1615 - RNA, 21 nt, Artificial Sequence
  TRAC-targeting guide sequence portion
aggaggauucggaacccaauc

SEQ ID NO: 1616 - RNA, 21 nt, Artificial Sequence
  TRAC-targeting guide sequence portion
aggauucggaacccaaucacu

SEQ ID NO: 1617 - RNA, 21 nt, Artificial Sequence
  TRAC-targeting guide sequence portion
agugauuggguuccgaauccu

SEQ ID NO: 1618 - RNA, 21 nt, Artificial Sequence
  TRAC-targeting guide sequence portion
aguggccggguuuaaucugcu

SEQ ID NO: 1619 - RNA, 21 nt, Artificial Sequence
  TRAC-targeting guide sequence portion
aucacugacagguuuugaaag

SEQ ID NO: 1620 - RNA, 21 nt, Artificial Sequence
  TRAC-targeting guide sequence portion
auccuccuccugaaaguggcc

SEQ ID NO: 1621 - RNA, 21 nt, Artificial Sequence
  TRAC-targeting guide sequence portion
augacgcugcggcuguggucc

SEQ ID NO: 1622 - RNA, 21 nt, Artificial Sequence
  TRAC-targeting guide sequence portion
augagcagauuaaacccggcc

SEQ ID NO: 1623 - RNA, 21 nt, Artificial Sequence
  TRAC-targeting guide sequence portion
auucggaacccaaucacugac

SEQ ID NO: 1624 - RNA, 21 nt, Artificial Sequence
  TRAC-targeting guide sequence portion
caaaaccugucagugauuggg

SEQ ID NO: 1625 - RNA, 21 nt, Artificial Sequence
  TRAC-targeting guide sequence portion
caaucacugacagguuuugaa

SEQ ID NO: 1626 - RNA, 21 nt, Artificial Sequence
  TRAC-targeting guide sequence portion
cacagccgcagcgucaugagc

SEQ ID NO: 1627 - RNA, 21 nt, Artificial Sequence
  TRAC-targeting guide sequence portion
caccucagcuggaccacagcc

SEQ ID NO: 1628 - RNA, 21 nt, Artificial Sequence
  TRAC-targeting guide sequence portion
cacugacagguuuugaaaguu

SEQ ID NO: 1629 - RNA, 21 nt, Artificial Sequence
  TRAC-targeting guide sequence portion
cacuuucaggaggaggauucg

SEQ ID NO: 1630 - RNA, 21 nt, Artificial Sequence
  TRAC-targeting guide sequence portion
cagccgcagcgucaugagcag

SEQ ID NO: 1631 - RNA, 21 nt, Artificial Sequence
  TRAC-targeting guide sequence portion
cagcgucaugagcagauuaaa

SEQ ID NO: 1632 - RNA, 21 nt, Artificial Sequence
  TRAC-targeting guide sequence portion
cagcuggaccacagccgcagc

SEQ ID NO: 1633 - RNA, 21 nt, Artificial Sequence
  TRAC-targeting guide sequence portion
caggaggaggauucggaaccc

SEQ ID NO: 1634 - RNA, 21 nt, Artificial Sequence
  TRAC-targeting guide sequence portion
cagguuuugaaaguuuagguu

SEQ ID NO: 1635 - RNA, 21 nt, Artificial Sequence
  TRAC-targeting guide sequence portion
cagugauuggguuccgaaucc

SEQ ID NO: 1636 - RNA, 21 nt, Artificial Sequence
  TRAC-targeting guide sequence portion
caugacgcugcggcugugguc

SEQ ID NO: 1637 - RNA, 21 nt, Artificial Sequence
  TRAC-targeting guide sequence portion
caugagcagauuaaacccggc

SEQ ID NO: 1638 - RNA, 21 nt, Artificial Sequence
  TRAC-targeting guide sequence portion
ccaaucacugacagguuuuga

SEQ ID NO: 1639 - RNA, 21 nt, Artificial Sequence
  TRAC-targeting guide sequence portion
ccacagccgcagcgucaugag

SEQ ID NO: 1640 - RNA, 21 nt, Artificial Sequence
  TRAC-targeting guide sequence portion
cccaaucacugacagguuuug

SEQ ID NO: 1641 - RNA, 21 nt, Artificial Sequence
  TRAC-targeting guide sequence portion
cccggccacuuucaggaggag

SEQ ID NO: 1642 - RNA, 21 nt, Artificial Sequence
  TRAC-targeting guide sequence portion
cccucaccucagcuggaccac

SEQ ID NO: 1643 - RNA, 21 nt, Artificial Sequence
  TRAC-targeting guide sequence portion
ccgaauccuccuccugaaagu

SEQ ID NO: 1644 - RNA, 21 nt, Artificial Sequence
  TRAC-targeting guide sequence portion
ccgcagcgucaugagcagauu

SEQ ID NO: 1645 - RNA, 21 nt, Artificial Sequence
  TRAC-targeting guide sequence portion
ccggccacuuucaggaggagg

SEQ ID NO: 1646 - RNA, 21 nt, Artificial Sequence
  TRAC-targeting guide sequence portion
ccggguuuaaucugcucauga

SEQ ID NO: 1647 - RNA, 21 nt, Artificial Sequence
  TRAC-targeting guide sequence portion
ccuaaacuuucaaaaccuguc

SEQ ID NO: 1648 - RNA, 21 nt, Artificial Sequence
  TRAC-targeting guide sequence portion
ccucaccucagcuggaccaca

SEQ ID NO: 1649 - RNA, 21 nt, Artificial Sequence
  TRAC-targeting guide sequence portion
ccucagcuggaccacagccgc

SEQ ID NO: 1650 - RNA, 21 nt, Artificial Sequence
  TRAC-targeting guide sequence portion
ccuccuccugaaaguggccgg

SEQ ID NO: 1651 - RNA, 21 nt, Artificial Sequence
  TRAC-targeting guide sequence portion
ccuccugaaaguggccggguu

SEQ ID NO: 1652 - RNA, 21 nt, Artificial Sequence
  TRAC-targeting guide sequence portion
ccugaaaguggccggguuuaa

SEQ ID NO: 1653 - RNA, 21 nt, Artificial Sequence
  TRAC-targeting guide sequence portion
ccugucagugauuggguuccg

SEQ ID NO: 1654 - RNA, 21 nt, Artificial Sequence
  TRAC-targeting guide sequence portion
cgaaccuaaacuuucaaaacc

SEQ ID NO: 1655 - RNA, 21 nt, Artificial Sequence
  TRAC-targeting guide sequence portion
cgaauccuccuccugaaagug

SEQ ID NO: 1656 - RNA, 21 nt, Artificial Sequence
  TRAC-targeting guide sequence portion
cgcagcgucaugagcagauua

SEQ ID NO: 1657 - RNA, 21 nt, Artificial Sequence
  TRAC-targeting guide sequence portion
cgcugcggcugugguccagcu

SEQ ID NO: 1658 - RNA, 21 nt, Artificial Sequence
  TRAC-targeting guide sequence portion
cggaacccaaucacugacagg

SEQ ID NO: 1659 - RNA, 21 nt, Artificial Sequence
  TRAC-targeting guide sequence portion
cggccacuuucaggaggagga

SEQ ID NO: 1660 - RNA, 21 nt, Artificial Sequence
  TRAC-targeting guide sequence portion
cggguuuaaucugcucaugac

SEQ ID NO: 1661 - RNA, 21 nt, Artificial Sequence
  TRAC-targeting guide sequence portion
cgucaugagcagauuaaaccc

SEQ ID NO: 1662 - RNA, 21 nt, Artificial Sequence
  TRAC-targeting guide sequence portion
cuaaacuuucaaaaccuguca

SEQ ID NO: 1663 - RNA, 21 nt, Artificial Sequence
  TRAC-targeting guide sequence portion
cucaccucagcuggaccacag

SEQ ID NO: 1664 - RNA, 21 nt, Artificial Sequence
  TRAC-targeting guide sequence portion
cucagcuggaccacagccgca

SEQ ID NO: 1665 - RNA, 21 nt, Artificial Sequence
  TRAC-targeting guide sequence portion
cucaugacgcugcggcugugg

SEQ ID NO: 1666 - RNA, 21 nt, Artificial Sequence
  TRAC-targeting guide sequence portion
cuccuccugaaaguggccggg

SEQ ID NO: 1667 - RNA, 21 nt, Artificial Sequence
  TRAC-targeting guide sequence portion
cuccugaaaguggccggguuu

SEQ ID NO: 1668 - RNA, 21 nt, Artificial Sequence
  TRAC-targeting guide sequence portion
cugaaaguggccggguuuaau

SEQ ID NO: 1669 - RNA, 21 nt, Artificial Sequence
  TRAC-targeting guide sequence portion
cugacagguuuugaaaguuua

SEQ ID NO: 1670 - RNA, 21 nt, Artificial Sequence
  TRAC-targeting guide sequence portion
cugcggcugugguccagcuga

SEQ ID NO: 1671 - RNA, 21 nt, Artificial Sequence
  TRAC-targeting guide sequence portion
cugcucaugacgcugcggcug

SEQ ID NO: 1672 - RNA, 21 nt, Artificial Sequence
  TRAC-targeting guide sequence portion
cugucagugauuggguuccga

SEQ ID NO: 1673 - RNA, 21 nt, Artificial Sequence
  TRAC-targeting guide sequence portion
cuuucaaaaccugucagugau

SEQ ID NO: 1674 - RNA, 21 nt, Artificial Sequence
  TRAC-targeting guide sequence portion
cuuucaggaggaggauucgga

SEQ ID NO: 1675 - RNA, 21 nt, Artificial Sequence
  TRAC-targeting guide sequence portion
gaaaguggccggguuuaaucu

SEQ ID NO: 1676 - RNA, 21 nt, Artificial Sequence
  TRAC-targeting guide sequence portion
gacagguuuugaaaguuuagg

SEQ ID NO: 1677 - RNA, 21 nt, Artificial Sequence
  TRAC-targeting guide sequence portion
gaccacagccgcagcgucaug

SEQ ID NO: 1678 - RNA, 21 nt, Artificial Sequence
  TRAC-targeting guide sequence portion
gagcagauuaaacccggccac

SEQ ID NO: 1679 - RNA, 21 nt, Artificial Sequence
  TRAC-targeting guide sequence portion
gaggaggauucggaacccaau

SEQ ID NO: 1680 - RNA, 21 nt, Artificial Sequence
  TRAC-targeting guide sequence portion
gaggauucggaacccaaucac

SEQ ID NO: 1681 - RNA, 21 nt, Artificial Sequence
  TRAC-targeting guide sequence portion
gauacgaaccuaaacuuucaa

SEQ ID NO: 1682 - RNA, 21 nt, Artificial Sequence
  TRAC-targeting guide sequence portion
gauuaaacccggccacuuuca

SEQ ID NO: 1683 - RNA, 21 nt, Artificial Sequence
  TRAC-targeting guide sequence portion
gauucggaacccaaucacuga

SEQ ID NO: 1684 - RNA, 21 nt, Artificial Sequence
  TRAC-targeting guide sequence portion
gauuggguuccgaauccuccu

SEQ ID NO: 1685 - RNA, 21 nt, Artificial Sequence
  TRAC-targeting guide sequence portion
gcagauuaaacccggccacuu

SEQ ID NO: 1686 - RNA, 21 nt, Artificial Sequence
  TRAC-targeting guide sequence portion
gcagcgucaugagcagauuaa

SEQ ID NO: 1687 - RNA, 21 nt, Artificial Sequence
  TRAC-targeting guide sequence portion
gccgcagcgucaugagcagau

SEQ ID NO: 1688 - RNA, 21 nt, Artificial Sequence
  TRAC-targeting guide sequence portion
gccggguuuaaucugcucaug

SEQ ID NO: 1689 - RNA, 21 nt, Artificial Sequence
  TRAC-targeting guide sequence portion
gcggcugugguccagcugagg

SEQ ID NO: 1690 - RNA, 21 nt, Artificial Sequence
  TRAC-targeting guide sequence portion
gcgucaugagcagauuaaacc

SEQ ID NO: 1691 - RNA, 21 nt, Artificial Sequence
  TRAC-targeting guide sequence portion
gcucaugacgcugcggcugug

SEQ ID NO: 1692 - RNA, 21 nt, Artificial Sequence
  TRAC-targeting guide sequence portion
gcugcggcugugguccagcug

SEQ ID NO: 1693 - RNA, 21 nt, Artificial Sequence
  TRAC-targeting guide sequence portion
gcuggaccacagccgcagcgu

SEQ ID NO: 1694 - RNA, 21 nt, Artificial Sequence
  TRAC-targeting guide sequence portion
ggaacccaaucacugacaggu

SEQ ID NO: 1695 - RNA, 21 nt, Artificial Sequence
  TRAC-targeting guide sequence portion
ggaccacagccgcagcgucau

SEQ ID NO: 1696 - RNA, 21 nt, Artificial Sequence
  TRAC-targeting guide sequence portion
ggaggaggauucggaacccaa

SEQ ID NO: 1697 - RNA, 21 nt, Artificial Sequence
  TRAC-targeting guide sequence portion
ggaggauucggaacccaauca

SEQ ID NO: 1698 - RNA, 21 nt, Artificial Sequence
  TRAC-targeting guide sequence portion
ggauucggaacccaaucacug

SEQ ID NO: 1699 - RNA, 21 nt, Artificial Sequence
  TRAC-targeting guide sequence portion
ggccggguuuaaucugcucau

SEQ ID NO: 1700 - RNA, 21 nt, Artificial Sequence
  TRAC-targeting guide sequence portion
ggguuccgaauccuccuccug

SEQ ID NO: 1701 - RNA, 21 nt, Artificial Sequence
  TRAC-targeting guide sequence portion
ggguuuaaucugcucaugacg

SEQ ID NO: 1702 - RNA, 21 nt, Artificial Sequence
  TRAC-targeting guide sequence portion
gguuccgaauccuccuccuga

SEQ ID NO: 1703 - RNA, 21 nt, Artificial Sequence
  TRAC-targeting guide sequence portion
gguuuaaucugcucaugacgc

SEQ ID NO: 1704 - RNA, 21 nt, Artificial Sequence
  TRAC-targeting guide sequence portion
gguuuugaaaguuuagguucg

SEQ ID NO: 1705 - RNA, 21 nt, Artificial Sequence
  TRAC-targeting guide sequence portion
gucagugauuggguuccgaau

SEQ ID NO: 1706 - RNA, 21 nt, Artificial Sequence
  TRAC-targeting guide sequence portion
gucaugagcagauuaaacccg

SEQ ID NO: 1707 - RNA, 21 nt, Artificial Sequence
  TRAC-targeting guide sequence portion
gugauuggguuccgaauccuc

SEQ ID NO: 1708 - RNA, 21 nt, Artificial Sequence
  TRAC-targeting guide sequence portion
guggccggguuuaaucugcuc

SEQ ID NO: 1709 - RNA, 21 nt, Artificial Sequence
  TRAC-targeting guide sequence portion
guuccgaauccuccuccugaa

SEQ ID NO: 1710 - RNA, 21 nt, Artificial Sequence
  TRAC-targeting guide sequence portion
guuuaaucugcucaugacgcu

SEQ ID NO: 1711 - RNA, 21 nt, Artificial Sequence
  TRAC-targeting guide sequence portion
guuuugaaaguuuagguucgu

SEQ ID NO: 1712 - RNA, 21 nt, Artificial Sequence
  TRAC-targeting guide sequence portion
uaaacccggccacuuucagga

SEQ ID NO: 1713 - RNA, 21 nt, Artificial Sequence
  TRAC-targeting guide sequence portion
uaaacuuucaaaaccugucag

SEQ ID NO: 1714 - RNA, 21 nt, Artificial Sequence
  TRAC-targeting guide sequence portion
uaaucugcucaugacgcugcg

SEQ ID NO: 1715 - RNA, 21 nt, Artificial Sequence
  TRAC-targeting guide sequence portion
uacgaaccuaaacuuucaaaa

SEQ ID NO: 1716 - RNA, 21 nt, Artificial Sequence
  TRAC-targeting guide sequence portion
ucaaaaccugucagugauugg

SEQ ID NO: 1717 - RNA, 21 nt, Artificial Sequence
  TRAC-targeting guide sequence portion
ucaccucagcuggaccacagc

SEQ ID NO: 1718 - RNA, 21 nt, Artificial Sequence
  TRAC-targeting guide sequence portion
ucacugacagguuuugaaagu

SEQ ID NO: 1719 - RNA, 21 nt, Artificial Sequence
  TRAC-targeting guide sequence portion
ucaggaggaggauucggaacc

SEQ ID NO: 1720 - RNA, 21 nt, Artificial Sequence
  TRAC-targeting guide sequence portion
ucagugauuggguuccgaauc

SEQ ID NO: 1721 - RNA, 21 nt, Artificial Sequence
  TRAC-targeting guide sequence portion
ucaugacgcugcggcuguggu

SEQ ID NO: 1722 - RNA, 21 nt, Artificial Sequence
  TRAC-targeting guide sequence portion
ucaugagcagauuaaacccgg

SEQ ID NO: 1723 - RNA, 21 nt, Artificial Sequence
  TRAC-targeting guide sequence portion
uccgaauccuccuccugaaag

SEQ ID NO: 1724 - RNA, 21 nt, Artificial Sequence
  TRAC-targeting guide sequence portion
uccuccuccugaaaguggccg

SEQ ID NO: 1725 - RNA, 21 nt, Artificial Sequence
  TRAC-targeting guide sequence portion
uccuccugaaaguggccgggu

SEQ ID NO: 1726 - RNA, 21 nt, Artificial Sequence
  TRAC-targeting guide sequence portion
uccugaaaguggccggguuua

SEQ ID NO: 1727 - RNA, 21 nt, Artificial Sequence
  TRAC-targeting guide sequence portion
ucggaacccaaucacugacag

SEQ ID NO: 1728 - RNA, 21 nt, Artificial Sequence
  TRAC-targeting guide sequence portion
ucugcucaugacgcugcggcu

SEQ ID NO: 1729 - RNA, 21 nt, Artificial Sequence
  TRAC-targeting guide sequence portion
ugaaaguggccggguuuaauc

SEQ ID NO: 1730 - RNA, 21 nt, Artificial Sequence
  TRAC-targeting guide sequence portion
ugacagguuuugaaaguuuag

SEQ ID NO: 1731 - RNA, 21 nt, Artificial Sequence
  TRAC-targeting guide sequence portion
ugacgcugcggcuguggucca

SEQ ID NO: 1732 - RNA, 21 nt, Artificial Sequence
  TRAC-targeting guide sequence portion
ugagcagauuaaacccggcca

SEQ ID NO: 1733 - RNA, 21 nt, Artificial Sequence
  TRAC-targeting guide sequence portion
ugauuggguuccgaauccucc

SEQ ID NO: 1734 - RNA, 21 nt, Artificial Sequence
  TRAC-targeting guide sequence portion
ugcucaugacgcugcggcugu

SEQ ID NO: 1735 - RNA, 21 nt, Artificial Sequence
  TRAC-targeting guide sequence portion
uggaccacagccgcagcguca

SEQ ID NO: 1736 - RNA, 21 nt, Artificial Sequence
  TRAC-targeting guide sequence portion
uggccggguuuaaucugcuca

SEQ ID NO: 1737 - RNA, 21 nt, Artificial Sequence
  TRAC-targeting guide sequence portion
uggguuccgaauccuccuccu

SEQ ID NO: 1738 - RNA, 21 nt, Artificial Sequence
  TRAC-targeting guide sequence portion
ugucagugauuggguuccgaa

SEQ ID NO: 1739 - RNA, 21 nt, Artificial Sequence
  TRAC-targeting guide sequence portion
uuaaucugcucaugacgcugc

SEQ ID NO: 1740 - RNA, 21 nt, Artificial Sequence
  TRAC-targeting guide sequence portion
uucaaaaccugucagugauug

SEQ ID NO: 1741 - RNA, 21 nt, Artificial Sequence
  TRAC-targeting guide sequence portion
uucaggaggaggauucggaac

SEQ ID NO: 1742 - RNA, 21 nt, Artificial Sequence
  TRAC-targeting guide sequence portion
uuccgaauccuccuccugaaa

SEQ ID NO: 1743 - RNA, 21 nt, Artificial Sequence
  TRAC-targeting guide sequence portion
uucggaacccaaucacugaca

SEQ ID NO: 1744 - RNA, 21 nt, Artificial Sequence
  TRAC-targeting guide sequence portion
uuggguuccgaauccuccucc

SEQ ID NO: 1745 - RNA, 21 nt, Artificial Sequence
  TRAC-targeting guide sequence portion
uuuaaucugcucaugacgcug

SEQ ID NO: 1746 - RNA, 21 nt, Artificial Sequence
  TRAC-targeting guide sequence portion
uuucaaaaccugucagugauu

SEQ ID NO: 1747 - RNA, 21 nt, Artificial Sequence
  TRAC-targeting guide sequence portion
uuucaggaggaggauucggaa

SEQ ID NO: 1748 - RNA, 22 nt, Artificial Sequence
  TRAC-targeting guide sequence portion
aaacccggccacuuucaggagg

SEQ ID NO: 1749 - RNA, 22 nt, Artificial Sequence
  TRAC-targeting guide sequence portion
aaaccugucagugauuggguuc

SEQ ID NO: 1750 - RNA, 22 nt, Artificial Sequence
  TRAC-targeting guide sequence portion
aaacuuucaaaaccugucagug

SEQ ID NO: 1751 - RNA, 22 nt, Artificial Sequence
  TRAC-targeting guide sequence portion
aaaguggccggguuuaaucugc

SEQ ID NO: 1752 - RNA, 22 nt, Artificial Sequence
  TRAC-targeting guide sequence portion
aacccaaucacugacagguuuu

SEQ ID NO: 1753 - RNA, 22 nt, Artificial Sequence
  TRAC-targeting guide sequence portion
aacccggccacuuucaggagga

SEQ ID NO: 1754 - RNA, 22 nt, Artificial Sequence
  TRAC-targeting guide sequence portion
aaccuaaacuuucaaaaccugu

SEQ ID NO: 1755 - RNA, 22 nt, Artificial Sequence
  TRAC-targeting guide sequence portion
aaccugucagugauuggguucc

SEQ ID NO: 1756 - RNA, 22 nt, Artificial Sequence
  TRAC-targeting guide sequence portion
aaguggccggguuuaaucugcu

SEQ ID NO: 1757 - RNA, 22 nt, Artificial Sequence
  TRAC-targeting guide sequence portion
aaucacugacagguuuugaaag

SEQ ID NO: 1758 - RNA, 22 nt, Artificial Sequence
  TRAC-targeting guide sequence portion
aauccuccuccugaaaguggcc

SEQ ID NO: 1759 - RNA, 22 nt, Artificial Sequence
  TRAC-targeting guide sequence portion
aaucugcucaugacgcugcggc

SEQ ID NO: 1760 - RNA, 22 nt, Artificial Sequence
  TRAC-targeting guide sequence portion
acagccgcagcgucaugagcag

SEQ ID NO: 1761 - RNA, 22 nt, Artificial Sequence
  TRAC-targeting guide sequence portion
acagguuuugaaaguuuagguu

SEQ ID NO: 1762 - RNA, 22 nt, Artificial Sequence
  TRAC-targeting guide sequence portion
accacagccgcagcgucaugag

SEQ ID NO: 1763 - RNA, 22 nt, Artificial Sequence
  TRAC-targeting guide sequence portion
acccaaucacugacagguuuug

SEQ ID NO: 1764 - RNA, 22 nt, Artificial Sequence
  TRAC-targeting guide sequence portion
acccggccacuuucaggaggag

SEQ ID NO: 1765 - RNA, 22 nt, Artificial Sequence
  TRAC-targeting guide sequence portion
accuaaacuuucaaaaccuguc

SEQ ID NO: 1766 - RNA, 22 nt, Artificial Sequence
  TRAC-targeting guide sequence portion
accucagcuggaccacagccgc

SEQ ID NO: 1767 - RNA, 22 nt, Artificial Sequence
  TRAC-targeting guide sequence portion
accugucagugauuggguuccg

SEQ ID NO: 1768 - RNA, 22 nt, Artificial Sequence
  TRAC-targeting guide sequence portion
acgaaccuaaacuuucaaaacc

SEQ ID NO: 1769 - RNA, 22 nt, Artificial Sequence
  TRAC-targeting guide sequence portion
acgcugcggcugugguccagcu

SEQ ID NO: 1770 - RNA, 22 nt, Artificial Sequence
  TRAC-targeting guide sequence portion
acugacagguuuugaaaguuua

SEQ ID NO: 1771 - RNA, 22 nt, Artificial Sequence
  TRAC-targeting guide sequence portion
acuuucaaaaccugucagugau

SEQ ID NO: 1772 - RNA, 22 nt, Artificial Sequence
  TRAC-targeting guide sequence portion
acuuucaggaggaggauucgga

SEQ ID NO: 1773 - RNA, 22 nt, Artificial Sequence
  TRAC-targeting guide sequence portion
agauacgaaccuaaacuuucaa

SEQ ID NO: 1774 - RNA, 22 nt, Artificial Sequence
  TRAC-targeting guide sequence portion
agauuaaacccggccacuuuca

SEQ ID NO: 1775 - RNA, 22 nt, Artificial Sequence
  TRAC-targeting guide sequence portion
agcagauuaaacccggccacuu

SEQ ID NO: 1776 - RNA, 22 nt, Artificial Sequence
  TRAC-targeting guide sequence portion
agccgcagcgucaugagcagau

SEQ ID NO: 1777 - RNA, 22 nt, Artificial Sequence
  TRAC-targeting guide sequence portion
agcgucaugagcagauuaaacc

SEQ ID NO: 1778 - RNA, 22 nt, Artificial Sequence
  TRAC-targeting guide sequence portion
agcuggaccacagccgcagcgu

SEQ ID NO: 1779 - RNA, 22 nt, Artificial Sequence
  TRAC-targeting guide sequence portion
aggaggauucggaacccaauca

SEQ ID NO: 1780 - RNA, 22 nt, Artificial Sequence
  TRAC-targeting guide sequence portion
agguuuugaaaguuuagguucg

SEQ ID NO: 1781 - RNA, 22 nt, Artificial Sequence
  TRAC-targeting guide sequence portion
agugauuggguuccgaauccuc

SEQ ID NO: 1782 - RNA, 22 nt, Artificial Sequence
  TRAC-targeting guide sequence portion
aguggccggguuuaaucugcuc

SEQ ID NO: 1783 - RNA, 22 nt, Artificial Sequence
  TRAC-targeting guide sequence portion
auacgaaccuaaacuuucaaaa

SEQ ID NO: 1784 - RNA, 22 nt, Artificial Sequence
  TRAC-targeting guide sequence portion
aucacugacagguuuugaaagu

SEQ ID NO: 1785 - RNA, 22 nt, Artificial Sequence
  TRAC-targeting guide sequence portion
auccuccuccugaaaguggccg

SEQ ID NO: 1786 - RNA, 22 nt, Artificial Sequence
  TRAC-targeting guide sequence portion
augacgcugcggcuguggucca

SEQ ID NO: 1787 - RNA, 22 nt, Artificial Sequence
  TRAC-targeting guide sequence portion
augagcagauuaaacccggcca

SEQ ID NO: 1788 - RNA, 22 nt, Artificial Sequence
  TRAC-targeting guide sequence portion
auucggaacccaaucacugaca

SEQ ID NO: 1789 - RNA, 22 nt, Artificial Sequence
  TRAC-targeting guide sequence portion
auuggguuccgaauccuccucc

SEQ ID NO: 1790 - RNA, 22 nt, Artificial Sequence
  TRAC-targeting guide sequence portion
caaaaccugucagugauugggu

SEQ ID NO: 1791 - RNA, 22 nt, Artificial Sequence
  TRAC-targeting guide sequence portion
caaucacugacagguuuugaaa

SEQ ID NO: 1792 - RNA, 22 nt, Artificial Sequence
  TRAC-targeting guide sequence portion
cacagccgcagcgucaugagca

SEQ ID NO: 1793 - RNA, 22 nt, Artificial Sequence
  TRAC-targeting guide sequence portion
caccucagcuggaccacagccg

SEQ ID NO: 1794 - RNA, 22 nt, Artificial Sequence
  TRAC-targeting guide sequence portion
cacugacagguuuugaaaguuu

SEQ ID NO: 1795 - RNA, 22 nt, Artificial Sequence
  TRAC-targeting guide sequence portion
cacuuucaggaggaggauucgg

SEQ ID NO: 1796 - RNA, 22 nt, Artificial Sequence
  TRAC-targeting guide sequence portion
cagccgcagcgucaugagcaga

SEQ ID NO: 1797 - RNA, 22 nt, Artificial Sequence
  TRAC-targeting guide sequence portion
cagcgucaugagcagauuaaac

SEQ ID NO: 1798 - RNA, 22 nt, Artificial Sequence
  TRAC-targeting guide sequence portion
cagcuggaccacagccgcagcg

SEQ ID NO: 1799 - RNA, 22 nt, Artificial Sequence
  TRAC-targeting guide sequence portion
caggaggaggauucggaaccca

SEQ ID NO: 1800 - RNA, 22 nt, Artificial Sequence
  TRAC-targeting guide sequence portion
cagguuuugaaaguuuagguuc

SEQ ID NO: 1801 - RNA, 22 nt, Artificial Sequence
  TRAC-targeting guide sequence portion
cagugauuggguuccgaauccu

SEQ ID NO: 1802 - RNA, 22 nt, Artificial Sequence
  TRAC-targeting guide sequence portion
caugacgcugcggcuguggucc

SEQ ID NO: 1803 - RNA, 22 nt, Artificial Sequence
  TRAC-targeting guide sequence portion
caugagcagauuaaacccggcc

SEQ ID NO: 1804 - RNA, 22 nt, Artificial Sequence
  TRAC-targeting guide sequence portion
ccaaucacugacagguuuugaa

SEQ ID NO: 1805 - RNA, 22 nt, Artificial Sequence
  TRAC-targeting guide sequence portion
ccacagccgcagcgucaugagc

SEQ ID NO: 1806 - RNA, 22 nt, Artificial Sequence
  TRAC-targeting guide sequence portion
ccacuuucaggaggaggauucg

SEQ ID NO: 1807 - RNA, 22 nt, Artificial Sequence
  TRAC-targeting guide sequence portion
cccaaucacugacagguuuuga

SEQ ID NO: 1808 - RNA, 22 nt, Artificial Sequence
  TRAC-targeting guide sequence portion
cccucaccucagcuggaccaca

SEQ ID NO: 1809 - RNA, 22 nt, Artificial Sequence
  TRAC-targeting guide sequence portion
ccgaauccuccuccugaaagug

SEQ ID NO: 1810 - RNA, 22 nt, Artificial Sequence
  TRAC-targeting guide sequence portion
ccgcagcgucaugagcagauua

SEQ ID NO: 1811 - RNA, 22 nt, Artificial Sequence
  TRAC-targeting guide sequence portion
ccggccacuuucaggaggagga

SEQ ID NO: 1812 - RNA, 22 nt, Artificial Sequence
  TRAC-targeting guide sequence portion
ccggguuuaaucugcucaugac

SEQ ID NO: 1813 - RNA, 22 nt, Artificial Sequence
  TRAC-targeting guide sequence portion
ccuaaacuuucaaaaccuguca

SEQ ID NO: 1814 - RNA, 22 nt, Artificial Sequence
  TRAC-targeting guide sequence portion
ccucaccucagcuggaccacag

SEQ ID NO: 1815 - RNA, 22 nt, Artificial Sequence
  TRAC-targeting guide sequence portion
ccucagcuggaccacagccgca

SEQ ID NO: 1816 - RNA, 22 nt, Artificial Sequence
  TRAC-targeting guide sequence portion
ccuccuccugaaaguggccggg

SEQ ID NO: 1817 - RNA, 22 nt, Artificial Sequence
  TRAC-targeting guide sequence portion
ccuccugaaaguggccggguuu

SEQ ID NO: 1818 - RNA, 22 nt, Artificial Sequence
  TRAC-targeting guide sequence portion
ccugaaaguggccggguuuaau

SEQ ID NO: 1819 - RNA, 22 nt, Artificial Sequence
  TRAC-targeting guide sequence portion
ccugucagugauuggguuccga

SEQ ID NO: 1820 - RNA, 22 nt, Artificial Sequence
  TRAC-targeting guide sequence portion
cgaaccuaaacuuucaaaaccu

SEQ ID NO: 1821 - RNA, 22 nt, Artificial Sequence
  TRAC-targeting guide sequence portion
cgcagcgucaugagcagauuaa

SEQ ID NO: 1822 - RNA, 22 nt, Artificial Sequence
  TRAC-targeting guide sequence portion
cgcugcggcugugguccagcug

SEQ ID NO: 1823 - RNA, 22 nt, Artificial Sequence
  TRAC-targeting guide sequence portion
cggaacccaaucacugacaggu

SEQ ID NO: 1824 - RNA, 22 nt, Artificial Sequence
  TRAC-targeting guide sequence portion
cggguuuaaucugcucaugacg

SEQ ID NO: 1825 - RNA, 22 nt, Artificial Sequence
  TRAC-targeting guide sequence portion
cgucaugagcagauuaaacccg

SEQ ID NO: 1826 - RNA, 22 nt, Artificial Sequence
  TRAC-targeting guide sequence portion
cuaaacuuucaaaaccugucag

SEQ ID NO: 1827 - RNA, 22 nt, Artificial Sequence
  TRAC-targeting guide sequence portion
cucaccucagcuggaccacagc

SEQ ID NO: 1828 - RNA, 22 nt, Artificial Sequence
  TRAC-targeting guide sequence portion
cucagcuggaccacagccgcag

SEQ ID NO: 1829 - RNA, 22 nt, Artificial Sequence
  TRAC-targeting guide sequence portion
cucaugacgcugcggcuguggu

SEQ ID NO: 1830 - RNA, 22 nt, Artificial Sequence
  TRAC-targeting guide sequence portion
cuccuccugaaaguggccgggu

SEQ ID NO: 1831 - RNA, 22 nt, Artificial Sequence
  TRAC-targeting guide sequence portion
cuccugaaaguggccggguuua

SEQ ID NO: 1832 - RNA, 22 nt, Artificial Sequence
  TRAC-targeting guide sequence portion
cugaaaguggccggguuuaauc

SEQ ID NO: 1833 - RNA, 22 nt, Artificial Sequence
  TRAC-targeting guide sequence portion
cugacagguuuugaaaguuuag

SEQ ID NO: 1834 - RNA, 22 nt, Artificial Sequence
  TRAC-targeting guide sequence portion
cugcucaugacgcugcggcugu

SEQ ID NO: 1835 - RNA, 22 nt, Artificial Sequence
  TRAC-targeting guide sequence portion
cuggaccacagccgcagcguca

SEQ ID NO: 1836 - RNA, 22 nt, Artificial Sequence
  TRAC-targeting guide sequence portion
cugucagugauuggguuccgaa

SEQ ID NO: 1837 - RNA, 22 nt, Artificial Sequence
  TRAC-targeting guide sequence portion
cuuucaaaaccugucagugauu

SEQ ID NO: 1838 - RNA, 22 nt, Artificial Sequence
  TRAC-targeting guide sequence portion
cuuucaggaggaggauucggaa

SEQ ID NO: 1839 - RNA, 22 nt, Artificial Sequence
  TRAC-targeting guide sequence portion
gaaaguggccggguuuaaucug

SEQ ID NO: 1840 - RNA, 22 nt, Artificial Sequence
  TRAC-targeting guide sequence portion
gaacccaaucacugacagguuu

SEQ ID NO: 1841 - RNA, 22 nt, Artificial Sequence
  TRAC-targeting guide sequence portion
gaaccuaaacuuucaaaaccug

SEQ ID NO: 1842 - RNA, 22 nt, Artificial Sequence
  TRAC-targeting guide sequence portion
gaauccuccuccugaaaguggc

SEQ ID NO: 1843 - RNA, 22 nt, Artificial Sequence
  TRAC-targeting guide sequence portion
gacagguuuugaaaguuuaggu

SEQ ID NO: 1844 - RNA, 22 nt, Artificial Sequence
  TRAC-targeting guide sequence portion
gaccacagccgcagcgucauga

SEQ ID NO: 1845 - RNA, 22 nt, Artificial Sequence
  TRAC-targeting guide sequence portion
gacgcugcggcugugguccagc

SEQ ID NO: 1846 - RNA, 22 nt, Artificial Sequence
  TRAC-targeting guide sequence portion
gagcagauuaaacccggccacu

SEQ ID NO: 1847 - RNA, 22 nt, Artificial Sequence
  TRAC-targeting guide sequence portion
gaggaggauucggaacccaauc

SEQ ID NO: 1848 - RNA, 22 nt, Artificial Sequence
  TRAC-targeting guide sequence portion
gaggauucggaacccaaucacu

SEQ ID NO: 1849 - RNA, 22 nt, Artificial Sequence
  TRAC-targeting guide sequence portion
gauacgaaccuaaacuuucaaa

SEQ ID NO: 1850 - RNA, 22 nt, Artificial Sequence
  TRAC-targeting guide sequence portion
gauucggaacccaaucacugac

SEQ ID NO: 1851 - RNA, 22 nt, Artificial Sequence
  TRAC-targeting guide sequence portion
gcagcgucaugagcagauuaaa

SEQ ID NO: 1852 - RNA, 22 nt, Artificial Sequence
  TRAC-targeting guide sequence portion
gccacuuucaggaggaggauuc

SEQ ID NO: 1853 - RNA, 22 nt, Artificial Sequence
  TRAC-targeting guide sequence portion
gccgcagcgucaugagcagauu

SEQ ID NO: 1854 - RNA, 22 nt, Artificial Sequence
  TRAC-targeting guide sequence portion
gccggguuuaaucugcucauga

SEQ ID NO: 1855 - RNA, 22 nt, Artificial Sequence
  TRAC-targeting guide sequence portion
gcgucaugagcagauuaaaccc

SEQ ID NO: 1856 - RNA, 22 nt, Artificial Sequence
  TRAC-targeting guide sequence portion
gcucaugacgcugcggcugugg

SEQ ID NO: 1857 - RNA, 22 nt, Artificial Sequence
  TRAC-targeting guide sequence portion
gcugcggcugugguccagcuga

SEQ ID NO: 1858 - RNA, 22 nt, Artificial Sequence
  TRAC-targeting guide sequence portion
ggaccacagccgcagcgucaug

SEQ ID NO: 1859 - RNA, 22 nt, Artificial Sequence
  TRAC-targeting guide sequence portion
ggaggaggauucggaacccaau

SEQ ID NO: 1860 - RNA, 22 nt, Artificial Sequence
  TRAC-targeting guide sequence portion
ggaggauucggaacccaaucac

SEQ ID NO: 1861 - RNA, 22 nt, Artificial Sequence
  TRAC-targeting guide sequence portion
ggauucggaacccaaucacuga

SEQ ID NO: 1862 - RNA, 22 nt, Artificial Sequence
  TRAC-targeting guide sequence portion
ggccggguuuaaucugcucaug

SEQ ID NO: 1863 - RNA, 22 nt, Artificial Sequence
  TRAC-targeting guide sequence portion
ggguuccgaauccuccuccuga

SEQ ID NO: 1864 - RNA, 22 nt, Artificial Sequence
  TRAC-targeting guide sequence portion
ggguuuaaucugcucaugacgc

SEQ ID NO: 1865 - RNA, 22 nt, Artificial Sequence
  TRAC-targeting guide sequence portion
gguuccgaauccuccuccugaa

SEQ ID NO: 1866 - RNA, 22 nt, Artificial Sequence
  TRAC-targeting guide sequence portion
gguuuaaucugcucaugacgcu

SEQ ID NO: 1867 - RNA, 22 nt, Artificial Sequence
  TRAC-targeting guide sequence portion
gguuuugaaaguuuagguucgu

SEQ ID NO: 1868 - RNA, 22 nt, Artificial Sequence
  TRAC-targeting guide sequence portion
gucagugauuggguuccgaauc

SEQ ID NO: 1869 - RNA, 22 nt, Artificial Sequence
  TRAC-targeting guide sequence portion
gucaugagcagauuaaacccgg

SEQ ID NO: 1870 - RNA, 22 nt, Artificial Sequence
  TRAC-targeting guide sequence portion
gugauuggguuccgaauccucc

SEQ ID NO: 1871 - RNA, 22 nt, Artificial Sequence
  TRAC-targeting guide sequence portion
guggccggguuuaaucugcuca

SEQ ID NO: 1872 - RNA, 22 nt, Artificial Sequence
  TRAC-targeting guide sequence portion
guuccgaauccuccuccugaaa

SEQ ID NO: 1873 - RNA, 22 nt, Artificial Sequence
  TRAC-targeting guide sequence portion
guuuaaucugcucaugacgcug

SEQ ID NO: 1874 - RNA, 22 nt, Artificial Sequence
  TRAC-targeting guide sequence portion
guuuugaaaguuuagguucgua

SEQ ID NO: 1875 - RNA, 22 nt, Artificial Sequence
  TRAC-targeting guide sequence portion
uaaacuuucaaaaccugucagu

SEQ ID NO: 1876 - RNA, 22 nt, Artificial Sequence
  TRAC-targeting guide sequence portion
uaaucugcucaugacgcugcgg

SEQ ID NO: 1877 - RNA, 22 nt, Artificial Sequence
  TRAC-targeting guide sequence portion
uacagauacgaaccuaaacuuu

SEQ ID NO: 1878 - RNA, 22 nt, Artificial Sequence
  TRAC-targeting guide sequence portion
uacgaaccuaaacuuucaaaac

SEQ ID NO: 1879 - RNA, 22 nt, Artificial Sequence
  TRAC-targeting guide sequence portion
ucaaaaccugucagugauuggg

SEQ ID NO: 1880 - RNA, 22 nt, Artificial Sequence
  TRAC-targeting guide sequence portion
ucaccucagcuggaccacagcc

SEQ ID NO: 1881 - RNA, 22 nt, Artificial Sequence
  TRAC-targeting guide sequence portion
ucacugacagguuuugaaaguu

SEQ ID NO: 1882 - RNA, 22 nt, Artificial Sequence
  TRAC-targeting guide sequence portion
ucaggaggaggauucggaaccc

SEQ ID NO: 1883 - RNA, 22 nt, Artificial Sequence
  TRAC-targeting guide sequence portion
ucagugauuggguuccgaaucc

SEQ ID NO: 1884 - RNA, 22 nt, Artificial Sequence
  TRAC-targeting guide sequence portion
ucaugacgcugcggcugugguc

SEQ ID NO: 1885 - RNA, 22 nt, Artificial Sequence
  TRAC-targeting guide sequence portion
ucaugagcagauuaaacccggc

SEQ ID NO: 1886 - RNA, 22 nt, Artificial Sequence
  TRAC-targeting guide sequence portion
uccgaauccuccuccugaaagu

SEQ ID NO: 1887 - RNA, 22 nt, Artificial Sequence
  TRAC-targeting guide sequence portion
uccuccuccugaaaguggccgg

SEQ ID NO: 1888 - RNA, 22 nt, Artificial Sequence
  TRAC-targeting guide sequence portion
uccuccugaaaguggccggguu

SEQ ID NO: 1889 - RNA, 22 nt, Artificial Sequence
  TRAC-targeting guide sequence portion
uccugaaaguggccggguuuaa

SEQ ID NO: 1890 - RNA, 22 nt, Artificial Sequence
  TRAC-targeting guide sequence portion
ucggaacccaaucacugacagg

SEQ ID NO: 1891 - RNA, 22 nt, Artificial Sequence
  TRAC-targeting guide sequence portion
ucugcucaugacgcugcggcug

SEQ ID NO: 1892 - RNA, 22 nt, Artificial Sequence
  TRAC-targeting guide sequence portion
ugaaaguggccggguuuaaucu

SEQ ID NO: 1893 - RNA, 22 nt, Artificial Sequence
  TRAC-targeting guide sequence portion
ugacagguuuugaaaguuuagg

SEQ ID NO: 1894 - RNA, 22 nt, Artificial Sequence
  TRAC-targeting guide sequence portion
ugagcagauuaaacccggccac

SEQ ID NO: 1895 - RNA, 22 nt, Artificial Sequence
  TRAC-targeting guide sequence portion
ugauuggguuccgaauccuccu

SEQ ID NO: 1896 - RNA, 22 nt, Artificial Sequence
  TRAC-targeting guide sequence portion
ugcggcugugguccagcugagg

SEQ ID NO: 1897 - RNA, 22 nt, Artificial Sequence
  TRAC-targeting guide sequence portion
ugcucaugacgcugcggcugug

SEQ ID NO: 1898 - RNA, 22 nt, Artificial Sequence
  TRAC-targeting guide sequence portion
uggaccacagccgcagcgucau

SEQ ID NO: 1899 - RNA, 22 nt, Artificial Sequence
  TRAC-targeting guide sequence portion
uggccggguuuaaucugcucau

SEQ ID NO: 1900 - RNA, 22 nt, Artificial Sequence
  TRAC-targeting guide sequence portion
uggguuccgaauccuccuccug

SEQ ID NO: 1901 - RNA, 22 nt, Artificial Sequence
  TRAC-targeting guide sequence portion
ugucagugauuggguuccgaau

SEQ ID NO: 1902 - RNA, 22 nt, Artificial Sequence
  TRAC-targeting guide sequence portion
uuaaacccggccacuuucagga

SEQ ID NO: 1903 - RNA, 22 nt, Artificial Sequence
  TRAC-targeting guide sequence portion
uuaaucugcucaugacgcugcg

SEQ ID NO: 1904 - RNA, 22 nt, Artificial Sequence
  TRAC-targeting guide sequence portion
uucaaaaccugucagugauugg

SEQ ID NO: 1905 - RNA, 22 nt, Artificial Sequence
  TRAC-targeting guide sequence portion
uucaggaggaggauucggaacc

SEQ ID NO: 1906 - RNA, 22 nt, Artificial Sequence
  TRAC-targeting guide sequence portion
uuccgaauccuccuccugaaag

SEQ ID NO: 1907 - RNA, 22 nt, Artificial Sequence
  TRAC-targeting guide sequence portion
uucggaacccaaucacugacag

SEQ ID NO: 1908 - RNA, 22 nt, Artificial Sequence
  TRAC-targeting guide sequence portion
uuggguuccgaauccuccuccu

SEQ ID NO: 1909 - RNA, 22 nt, Artificial Sequence
  TRAC-targeting guide sequence portion
uuuaaucugcucaugacgcugc

SEQ ID NO: 1910 - RNA, 22 nt, Artificial Sequence
  TRAC-targeting guide sequence portion
uuucaaaaccugucagugauug

SEQ ID NO: 1911 - RNA, 22 nt, Artificial Sequence
  TRAC-targeting guide sequence portion
uuucaggaggaggauucggaac

SEQ ID NO: 1912 - RNA, 21 nt, Artificial Sequence
  TRAC-targeting guide sequence portion
ucucucagcugguacacggca

SEQ ID NO: 1913 - RNA, 21 nt, Artificial Sequence
  TRAC-targeting guide sequence portion
ucucgaccagcuugacaucac

SEQ ID NO: 1914 - RNA, 21 nt, Artificial Sequence
  TRAC-targeting guide sequence portion
uuaaacccggccacuuucagg

SEQ ID NO: 1915 - RNA, 21 nt, Artificial Sequence
  TRAC-targeting guide sequence portion
aagagcaacagugcuguggcc

SEQ ID NO: 1916 - RNA, 21 nt, Artificial Sequence
  TRAC-targeting guide sequence portion
gcuggggaagaaggugucuuc

SEQ ID NO: 1917 - RNA, 21 nt, Artificial Sequence
  TRAC-targeting guide sequence portion
cagcugguacacggcaggguc

SEQ ID NO: 1918 - RNA, 21 nt, Artificial Sequence
  TRAC-targeting guide sequence portion
agauuaaacccggccacuuuc

SEQ ID NO: 1919 - RNA, 21 nt, Artificial Sequence
  TRAC-targeting guide sequence portion
gccacuuucaggaggaggauu

SEQ ID NO: 1920 - RNA, 22 nt, Artificial Sequence
  TRAC-targeting guide sequence portion
cggccacuuucaggaggaggau

SEQ ID NO: 1921 - RNA, 22 nt, Artificial Sequence
  TRAC-targeting guide sequence portion
cugacccugccguguaccagcu

SEQ ID NO: 1922 - RNA, 22 nt, Artificial Sequence
  TRAC-targeting guide sequence portion
ggccacuuucaggaggaggauu

SEQ ID NO: 1923 - RNA, 22 nt, Artificial Sequence
  TRAC-targeting guide sequence portion
gagucucucagcugguacacgg

SEQ ID NO: 1924 - RNA, 22 nt, Artificial Sequence
  TRAC-targeting guide sequence portion
auccagaacccugacccugccg

SEQ ID NO: 1925 - RNA, 22 nt, Artificial Sequence
  TRAC-targeting guide sequence portion
ugugacacauuuguuugagaau

SEQ ID NO: 1926 - RNA, 22 nt, Artificial Sequence
  TRAC-targeting guide sequence portion
uaaacccggccacuuucaggag

SEQ ID NO: 1927 - RNA, 22 nt, Artificial Sequence
  TRAC-targeting guide sequence portion
caagagcaacagugcuguggcc

SEQ ID NO: 1928 - RNA, 22 nt, Artificial Sequence
  TRAC-targeting guide sequence portion
cucagcugguacacggcagggu

SEQ ID NO: 1929 - RNA, 22 nt, Artificial Sequence
  TRAC-targeting guide sequence portion
gccuucaacaacagcauuauuc

SEQ ID NO: 1930 - RNA, 22 nt, Artificial Sequence
  TRAC-targeting guide sequence portion
gucccacagauauccagaaccc

SEQ ID NO: 1931 - RNA, 22 nt, Artificial Sequence
  TRAC-targeting guide sequence portion
uccucuugucccacagauaucc

SEQ ID NO: 1932 - RNA, 22 nt, Artificial Sequence
  TRAC-targeting guide sequence portion
uucuuccccagcccagguaagg

SEQ ID NO: 1933 - RNA, 20 nt, Artificial Sequence
  Example RNA guide sequence portion
aaaaaaauguacuugguucc

SEQ ID NO: 1934 - RNA, 17 nt, Artificial Sequence
  17 nucleotide guide sequence 1
aaaauguacuugguucc

SEQ ID NO: 1935 - RNA, 17 nt, Artificial Sequence
  17 nucleotide guide sequence 2
aaaaauguacuugguuc

SEQ ID NO: 1936 - RNA, 17 nt, Artificial Sequence
  17 nucleotide guide sequence 3
aaaaaauguacuugguu

SEQ ID NO: 1937 - RNA, 17 nt, Artificial Sequence
  17 nucleotide guide sequence 4
aaaaaaauguacuuggu

SEQ ID NO: 1938 - RNA, 21 nt, Artificial Sequence
  B2M gRNA 15 guide sequence portion
ucacagcccaagauaguuaag

SEQ ID NO: 1939 - protein, 1154 aa, Artificial Sequence
  OMNI-75 amino acid sequence
MTKYSVGLDIGIASCGWSIIDIEKKEIIDLGSRIFPSGNAAGNQDRRSFRGTRRLIRRRKNRLSDLTKFLAENGFAVSNDKNQNPYALRSKGLAEQLSKEELATALYHIVNRRGISYDLGDLEDDGTSGVSDYKSSININRQLLREKTIGQIQLERLNEFGQVRGQVKADDETTLLNVFPSAAYADEAKQILEKQAEYYPEITDEFIAKINELITRKREYFVGPGNEKSRTDYGIYKTDGRTLDNLFDELIGTDKINGEKRASASSLTAQIYNLLNDLNNLTVPNTEDGKLTTETKKEILSAAKRAEGIFGKVQICKLIGVKFDELKTKKGGEIEFKHTLFAYRKFRKALAESNIEANDLSTEFFDKIADILTLNTEKAEIRKQLDKADFAISDEVKELIVKENKNLLVDGRATWHSFSYKTLNLLIPELLNTSDEQMTILTGLGLMKPDNEKYQGLKNIPAAQITEEIYNPVVAKSTREAINVFNAIAKRVGAENIAHVVIELPREDNEDDVKKQKIKFQKAQEAEKNAADELVKQQMTIPDSSLLAQYRKFKGLSQKVRYWYQQETFCPYCGEKIKVIQLINNNESFEIDHIIPISVSFDDSQNNKVLVHSQCNQAKEKQTPLGWINNGGGFGQTKAEYIARVKANKNFNKNKVDNLLNDADLNDIITRRSFIQRNLNDTRYASRVVLDEFYSFFKSNHLPTKVKVVRGKWTSQMRKKWNSAGGLAKTRDTHHHHAIDASIIASFPLLKAFDKAVKLIDIDKETGEILQDKAAVKKAREAELLAQWAIPNEKEFEKLDSEIFDFPLFKQVELANDIDDPENPVKFSHKVDKKANRAVANQTIYGTRMKETEVVKRGKTEIVQDEYIFGTIKNIYNVDDFAKFKKLYDEALKKEDVKFLMQEKDPKTWEKLLKILKNTPDFEEKTQTDGKVKVIPVSPFELYRRENGFITKYAKHNNGPKVVSLKYYDSKIGSHIDITPENARNKVVLQSLKPWRTDVYYNPDTQQYELLGLKYADLKFTKGVYGITEEAYEKLKHGIEADGTILWKPIGRNSEFRFSLYRNDRVKIVDDKGEEIELLFGSRAGNNEGYVEMKPIHKARFEGAEEIAFYGKTSSGRFLKPLAKKGYKLYKVNTGILGTPYYTEKESDQPKLNL

SEQ ID NO: 1940 - protein, 1062 aa, Artificial Sequence
  OMNI-79 amino acid sequence
MEKRLGLDIGTNSIGWCLYEGDSILDIGVRIFSDGRDPKSGASLAVDRRNARAMRRRRDRYLGRRSALIKALKAHGLFPAEQDAAKALEREDPYSLRVRALDHRLDPHQIGRAIFHLNQRRGFRSNRKADRVLGDQESGLISTATRVLDEAMAKSGARTLGEFLASRDTRRVRMRPDVKGYDFYPNRQHYLEEFEKIWDAQSQYHPDLLSQQAKSAIHRIIFHQRPLKPQAVGTCTFAGLHGIPGDETRLPKAHPLFQQRRLYEEVNQLEIVCASAPARKLTRDERDALILKLQDKKKVTFSTLARTIRLKEGERFNKESENRKDLAGDEVRAEMSDKTRFGRRWFHLSLDEQWSVIDRLLNEESTEDLLAWLEKEWSLPSDVAEAVANAHLPDGHGRFGLTATVRLLEHLKADVVTYAEAARRAGFHHSDFRDGACYDELPYYGEILSREIAPGKDEYGDPLERQWGKITNPTVHIGLNQLRRLINALVRRHGRPDFIFVELARELKLNEKQKADHKRRIKQTTDAARARAEKLREIGQRDSGSNRMLLRIWEELNPSNPLDRRCPYCAEPISIEMLMSGSADIDHIVPYSRCLDDSAANKVVAHNHCNRQKGNRTPWEQWGQTTRWPLIQEQVARMHRSKQWRFGPDAMERVDRDGGFIARQLTDTQYLSRIAAQYLSALYTPDEGRRVYAVTGRLTAMLRRLWGLNDILPDHNWVLNPHSNAPKNRLDHRHHAIDAAVVGATTPAMIQQVARAAARAEEQDLDRLFADLPPPWPGFREELQGRIMAAVVSHKPDHGRKGRPLPGRDSTSGRLHNDTAYGFTGRRNAKGMPIVVTRKPLLALKPEDLTDPERIPDPALQGALFEATRGATGKDFEKALRDFSRRDGPYQGIRRIRLTEALNVIPIRDRTGHAYKGVKGDANARFDVWRLPDGKWITRWKDRDGIEHSGIVSLFDAHQPSQVYHRPHPAAKKVLSLRQNDLVAVEHDGDPGKIMRVVKFSANGSITFAPHNEAGPLKTRDTDPADPFRYVTTVASGLKKMRARQVRIDELGKVHDPGPRED

SEQ ID NO: 1941 - protein, 1091 aa, Artificial Sequence
  OMNI-91 amino acid sequence
MSYAIGLDCGIASVGYAVMDLDEKGNPKRIIRLGSRIFPSAEHPKDGSSLALPRREARSTRRRLRRHKHRLERIRYMIVDEGILSQEQLDVLYSEPVSDIYMLRVDALDRPLTNEEFARVLIHLAQRRGFKSNRKVDKEDKDDGKLLTAVSGNTLLMKEKGYRTVGEMFAKDEKFSSQKRNKAENYTNTVSREMVEDEVHKLFAAQREFDCPFANETVENRYVNILFSQRSFEEGPGGDSPYGGNQIEKMIGRCTFFPEEQRAAKATYSFQYFSLLQAVNHIRIVSDGSIRTLRSDERKNVLEAAFQTDGLTFKRIRAVLGLSENDRFRNVYYRSDDKEEWESKTKFQYLHAYHEMRKRFDKLKKGHISIVSRTDLDEIGYALTVFKTDDKIISYLKEHTSLDKSEIDAVLMMPSFSKFGHISVKACKAIIPSLEQGMTYDKACENAGIKFQGHDSDGKTRYLPANPNDAPELEDINNPVVRRAVSQTIKVINAIIREQGESPAYLNLELAREMSKSFQDRQEIKKSHDQNNARNEKIKQEIADNFGKVNPSGQDILKLKLYHEQQGVSLYSQKVIAYDRLFEPGYVDIDHIVPYSICFDDSFRNKVLVFSNENREKGNRVPLDYLRGEEANNFVVYVKANVKDYKKKQRLLRSRPTEEDIKEFKERNLNDTKYLSRFLLNYIQDHLQFSESGSDKTKRVTSVNGSVTAYMRKRWGINKIRENGDLHHAVDAAVIACVTDGMINRISRWSKYHETEYEEFEGESYAVDPRTGEVLDRFPLPYPEFRKELDCRLFDNEKHMHEALTRLSNYRDVELSTIHPCFVSRMPNHKVTGPAHQDTVRSPRHYEEDGIVIAKTALQNLKLKDGEIEGYYKPESDRLLYDALKARLVEFGGDAKKAFKDDFYKPKSDGTRGPLVRKVKTFKKSSLNVSVNNGKGVADNGSMVRIDVFFVEGDGYYFIPIYVADTLKEELTNKAVVAHKSYDEWREMKEEDFQFSLYPNDLILVKKASGAIPLTINLKDSTLPPKIEKSEVFLYYRKSGIAGATIVCDNHDGSYYVTNLGIKTLASIEKYQVDVLGNYYKVGKERRQSFR

SEQ ID NO: 1942 - protein, 1050 aa, Artificial Sequence
  OMNI-93 amino acid sequence
MKRKCGIGLDIGIGSIGYVVISRTNNFDARIEDLGVRVFDSGENIRKKASNAQERRGYRSVRRLLRRRKHRKERVKKFFLKIKLMNEIQLKAWEERNGDQNVLQTRIKGLSEKLKPEEILDCIIHICNHRGYREFYDEDSCNENINKDDLKKIEGGLASFDELYQHGNYKSVAEMILKDPVFKTETTFVDYRNHKNNNRYVLIKREFVKKELENILHQQSKYYPQLTENNIKIICDNMVFIQRDFETGPGNENDKTRRFMGFIDSIGKCMYYKDEKRAYRSTVIADIYALVNCLSQFSFINTETGEILLPDNAATKIIDTALLNAAITENDIKNILKPYHLEMRKPEKLQVKVPDTVRTLKILKSVLTNAGYKYEELIKEKQFDVNNPSKLHQLCLLLSENITPARRTRVLKAKGWNEKLQKEVIRKKFGGTASVCEKYMIDAIEAFKRGETYGNFQARMLKEREETLSESKKQKFLSPFDKKIDEELIKNTVVFKSVNETRKILNELIRRYGSPEYINIEVADDLGRSFKERSKIIKRNNDKQKDREKIKNKLIELGLRKEGEVKPFDIERYRLWEEQEGRDLYTGEAIPLEKILSGIYDVDHIVPFSLILDDSLQNKALVNLGVNRQQKGQQVPLAFLNVVDKIDYLKRVNVLYKNKKISTKKYKYLMLPNLYANSELLTEWKSRNINDTRYITRFLVNYLSANLLFDSTKTKNVFGVKGIITSKMRKLWLNKKTWGDEQKNRDNNLHHAADALVIANLTPAYLEIASDKIKLDRIYKDYHKKISNEYLTYLSKSVNKMVKYYGFNKEYAEKLLGTPNSRIPAMIRNIADEADIRLWDNSIEYYKDVSEEQFYKNVKAFYNDDTAFAKSVKPVLVSYKQNRKYQGKFTKDNPLKKNEIKGAFIEKIDSLGNVNILDAKEYYCAELYKNLQGQTILRGIRYVDLQKKNKKLYIISSYPEDYKKHIMYLFANDYIKVFDNDGKIKFNGYYKSIKNVNRNAIYYKNNNSNILEEKTISKKDVVKKYSVDILGKIGGEIKCSVPFLSLEENI

SEQ ID NO: 1943 - protein, 1348 aa, Artificial Sequence
  OMNI-103 amino acid sequence
MSIKSDYFLGLDIGTDSIGWAVTDPEYHILRRKGKALWGIRLFDAANTAAERRTFRTSRRRIQRRRQRIRLLQELFAEEMVKLDPGFFQRLSDSAFWQEDKQEQQIYSLFTCENYTDVDYYREYPTIYHLRSALIQEKKEFDLRLLYLALHHLMKHRGHFLFNGSINNVTSFHTTFQTFADCLYDEFDIELECDSEDRFAEILKDKHARKTGKCSELEIICHIEKSNKQLKELFKLITGMKASLSVVFGDDELAEIEHNKISFSESSYDEVRLALEDEIQERTGILDIFHAVYSWAILADILEGGEYEGNSYLSVAKVSTYKKHGDDLRLLRTLVREYCPDHYKSFFSVSGKENYCAYAGTLKKNGKKQPIKRCSQEDFYKALKKLLNQMPTEQPEVKDIFIEIENGTFLPLQVSKDNGVIPYQVNKMELEKILQNAEEYLPFLKNIDEECGKTVSKKIIDLFEFRIPYYVGPLNTAKGENCWMVRKEAGRIYPWNFDEKVDRDQSAEKFIRRMTNQCTYLIHEDVVPKNSLLYSEFMVLNELNNVKIRSEKLPVELKQAIVLDLFKKQKQITGKKLLNYLNANGYDVKKEDLSGFDGNFKSSLSSYLTLKKVFGEELDKYSVQQMAEDIILWITLYGDDQKMLRRVIRKHYEQQLSEEQILSLSKLKFQGWGRLSRRLLSEMEGVDCETGECMTVMQGLRNTQNNLMQLLSQQFSFMELIEEENGNYYVDEITYDNLVKDMVISPSVKRAVWQTVQIVEEIKGVMGCQPKKIFVEMARSDEEKKRTVSRKDRLLEAYDAIKDEARQWQEELQKYSDGDFKAIKLYLYYTQMGQCMYTGRKIDLSQLNDATVWDRDHIYPQSKTKDDSLDNLVLVDRSVNAKKSDGMLSPEIQQRMRATWKYLKEKKLISEKKYERLTRVSPLTDEELAGFINRQLVETRQSSKAVATLLKRVYDEAEIVYVKAEAVSNFRRDNLDYIKVRDLNDYHHAKDAYQNIVVGNVFHEKFTSNPLRWLKNNPNTKYSLNQMFNFDLEKNGVVIWKRGKAGSIKCVEETLKRNDILFTRYAFCNKGGFFNQMLTAAPEDKTKAKGLVPIKKGMETWKYGGYTSVTPSHFMLVASKDKKGKEIRTIETVPLYRWKEFKENPDALLQYCREFYGLKEPKVLIPCIKKNARLVVNGFPMHLKGSTGKQLILQGAVQLCLNNENIKYLKKVTKYLEYNAQRRDKRTLLEVREVTGINKEENIQLYDVFVDKLSNTIYQYRPANPKDNLIKGREKFIELGLAEQCVVLGEVLHLFQCKPLTSDLTLIGGSPNTGTIKITKTISNCNVVKLLSQSIAGVKVREINLLII

SEQ ID NO: 1944 - protein, 1108 aa, Artificial Sequence
  OMNI-104 amino acid sequence
MKYKLGLDLGSTSLGWAAVKLNDAGAVEQLLDFGVRIFPDGRDAKTHAPINVVRRAARTMRRRGDRVKLRKKRVLQLIRKYGLDFDIRSNPILENPYELRVRALEHRLSPSELGRVLFHLALRRGFKSNRKETKGENGGKLKAATDALASAVGDGTLAQFQVQTKKFRFSNQFDGNVIKDGALYPTRDMYLDEFHRICDAQGLDKEMRAAFENAIFFQRPLIPPVVGTCIFAAGQPRAHKFEPVFQRWRALQQLNQLAILDNGQNVALTDQQRQCLVDILLYNFNGVKRDRGGRVKITFAEIKKQLGLSRTVKFNLESEQRKELNVDSTGFSFAEIGELDFWRSLTDEQQSDVLNKINDDQTEDAELIEYLVAHYGLSASRARAIIDIPLEDDVANVSVVAMKKMLPFLEGGQLYHLAVHSAGYHYGEQDVPLMDKLPYYGDLDVLKPSLMPARDGAYRTMNATVHIAMNQIRVVVNDLIERYGRPCAINIELGRDVRAGAKERAELDKQQSANKRKNDAIRAELAEIGILNPSREDFQKYKLWENLAPQPQNRRCVYTGEPITSLAALFKSGRFEIEHILPFAQTLDDSLANKTISAVAANRFKGNRSPAEAFDDPASPWAYADVWARAQNLPDGSRWRFDRDAMEKFTRHGDCIARALNDTRFMSVMAVNYLKHICSDKNKVRGLPGRLTAIFRDMWHLDWWKNHDDADTYRASHIHHAIDAFVIACMGAGNLQKLAENATHLEDFHGKTLKEKHRQLFADMYLPFPEFDYYDFRMRCEACVISYRPSVKEPAASDTVGCLHEDTAYKLEKFETGTRATMSRRIALPTTADARAKFKKDFDSLNPKTLEMFLAETGVANDANDIADQFLNWCQMRGIKKVRMFKTRVDTTTYVPVFRNRGDKNAFNRAWTEWYAAAGIARGMTEPKAKKAQQEKERRLLALYQNAAARAYKWFVSGNNFCADIFEIRSDDRRYPALAGQWQSEIISNYCATLNNGTPMWRCKYATARRVMRLRINDMVMAEFSRDNVPLLKGLEDAVRHQLAVQDTDTVNIIFRVKKISSNGAIFLRPHYIAKEDADTKTWKANATSLQKYKARKIRVSPTGKVLE

SEQ ID NO: 1945 - protein, 1383 aa, Artificial Sequence
  OMNI-120 amino acid sequence
MEKQNYYIGLDMGTSSVGWAVTDDSYHIIRRKGKDMWGIREFEEAKTSAERRSHRISRRRLQRSKVRIGLIKMYFDEEIRKVDPFFYERLDNSKYYQEDKDEIVKSPNGVFNDKEYTDKDYYNQYPTIFHLRKELINNENAPYDVRIVYLAVLNLFKRRGHFLNSSLRLDDESAEFSLKDAYSNLLTIMADNLPEELSIAFPEIDSDNTYLELQNILGTREFGRKQKGEKVAKLLGIDRKQKKEMEIVNGMVGLSIDCCKLFDIEADSKITAKFSDFGYAEKEPEILDQLGDNYGSILMAIKTVYDIGSLTEILKGQKYLSFARVEDYEQHKADLRKLKKVVKKYALERYDYFFRQKEDGTYSAYVNSVNSEKYNDLGSKDTKPNRRNMKARSRDDFYKGVKKLLKGMPEDDADVIEINKKIENETFMPKQLTAGNGIIPNQLHAMELKKILDNASGYLDFLNDVDESGFAVKERILRLYTFTFPYYVGPISSGSKTGWAIRKPGFEKGVILPWELDEKIDRTETAKRFIDRMVRRCTYLNDEMVLPKSSLKYERYCVLNEINNIRIDNTRIDNDLKKRLFNEIYLNGKKPGRKKIESFLYRNGVPRDAQVTGIDKELNNALSSYGKFKEIFGDELEKDSVKKMVDDIIFHCTVYGDSKKFIYDYIQKNYPESEYPLLNKKTIKRIIGFKFKDWGRFSEEMLDLQGCNYETGEVYSILTALWETNNNFMELINSDSFEYKKLLEEKSGSAISSLAEVTPELLDEYYFSAPVKKMILQTMGVIKEIVQIMKCEPDRIFIEMTRSDGEKGDKGRKDSRKKALLDLYKNIIDELHDKNYWKDLIENADKDGRLRSKRMYLYIKQMGMDMYTGEPIDLDYLFDENRYDIDHIYPRHFVKDDNIENNLVLVNKASNAKKTDIYPIPGFIKDNPKVWKLWEMLHKRGLINDVKYSRLRNSEPFTDEQKAGFIARQLVETSQGTKGVSDILKQVLPQTKLVYSKAGNVSRFRSDNKFYKSRLINDYHHANDAYLNIVVGNVYYTKFTSSPMNFIKNEYSKDSKKFEYNLDKMFAWKVERDGYTAWIPLKKGNEYIATIKTVEKMLAKNTPLLTRQSFVKSGVINKVTLYGKNTATHETYIPLKMSDPKMQDVTKYGGYTSVNICYFFLVEHEKKGKKVRTIEALPGYLEKKVENDPAELERYCVEGLGLESPSVRYRKIRIQSLLKVDGYYMHLSGKSGNSLIVRNACALSIGKKWQDYIHYIEKSEENGFKYDDSRITKENNIELYDIISEKHIDGVYKKRPCGIGDAVKNGKKKFKELTKENQCKVILQILQISSIGNYKADLSLIGGASMMGNMRISKEITKNEKVMLIHQSVTGLFEDKLVDLKSI

SEQ ID NO: 1946 - protein, 1097 aa, Artificial Sequence
  OMNI-124 amino acid sequence
MGKIIGLDIGIASVGWAVLDKDSYKIVEAGSNIFPAAEASKNQERREFRGLRRMTRRRRTRLDDFKKLWKNYYKNEYSVTPNNVTELKVKGLSEQLSELELYTVLYSYLKHRGISYLEDAVDEGKTGSDYLKGLQTNQKEMNTKFPSQIQYERLEKYGCFRGENKVSDDEVLSNVFTTSAYKKEIEELISVQDNLGNELDKDFIKKYFEIFSRKRKYYEGPGNELSRTDYGIYTTKIDENGNYITDKNLFEKLIGKCSVYPEEMRASAASYTAQEFNALNDLNNLIVNGRKLTKEEKISIIECYKTEKTINVRKIIKNVIGENIDQLSGYRMDKNDKELYHTFEVYNKLRKAFEEAGISFDFSREDFDEIGRILTLNIEREGIEDAIRISNLVLSSDAVDVLISVRKKNASLFSKWHSFSLKIMNELIPEMYEQPKNQMELLSDMKSIKSKMDEFKGLEDIPVETIIEDIYNPVVKRSIRITIKIINALKKKYSDIEKIVIEMPRDKNSDEEKERIKKFQKDQENELPNIIKRVKDEYGITLTPELIARKKGLAFKLKLWNEQNGRCPYSGRMIDIESLINDGDLFEVDHIIPLSISFDDSRSNKTLVYRVENQEKKNNTPFMYLSRLNRQWNYDKFAAFIKELYGSSGKDRKKFRKKMNNFLFTEDINKIDVLKGFINRNINDTRYASRVVLNSLQGYFRANDNNVKVSVINGSFTHQMRVNLSLGKDRDESFAHHAVDAMLIALSQMGYDAFRARQKDIVDFETGEIINGSAWENQDEMYKTVLYQEKWKNIKDNIIEAEPNIKYWHKVDKKCNRGLCNQTIYSTRKCDDKIWKVDKLNIRDKDDVKKLIYMIQNGKEDKILMAQNDPKTFANLKYILDEYSDCENPFVSYEKETGDLVRKYSKKHNGPKITYLKYMVEEVNSCIDISHKYGHEKGSKKVFLAQLVPFRTDVYYNNNSGKYYLIGIKQSDIKCKGNQYIIDEEKYTDNLIQNGLLKEGQKIEDLEKLGYLFKFSIFKNDTIEFEKKGELIKCRFLSQNSASKNRIEVKPIGKKDYESRNLPTLSTTTVINKYVKDILGNEKQVSGEKFEIIVDSK

SEQ ID NO: 1947 - protein, 1369 aa, Artificial Sequence
  OMNI-125 amino acid sequence
MKKVLGLDLGSASIGWAVVNVAETKEEKAAILGCGSRVIPISAEEKDSFEKGKAISTNADRTLKRGMRRNLKRYEQRRDDLRRLFIDQGWISDGEPLSESGKNSTYETLYLRSKAAQDEISLKDLARVLLSINKKRGYKSSRKTDSGEDGQLIDGMSIAKELAKTGKTPAEFALESIKSGKSGKFDFYRSDLEKEFDRIWDCQQSSYPELLTDEFKSQLSKMNKTGATKAFFAKYKLTTAENKGKDRLRNSLEWRVSALKEPLDKEKMAYVICELRGAIQSSSGYLGDISDRSKELYFNQETVGQYLYRRIKEEKGFSTRNQVFYRQDYIDEFNTIWATQSAFHPELTDTLKRKIADRILFYQRPLKSQKGLISFCQFESRPIKVIIDGKEKTRTTGSKVAPKSSPLFQEFKVLQILNNVTIKDRRTFDSRGLGKEEKESLAATLRIREKMKGSDALKQLGLDPRRYDLNYKELEGNSTLFSLFSKYIEIVNLEKNSEYELQKMAYEKALEVIRDTFNKLGCHSDIFTFNSDLPKEEYEQQPIFKLWHLLYSYEGDKSVTGTASLVRHIMDISGLPEPQSKIIAGVSFNNNYASLSHKAIKKILPYMKEGHQYSDACAMAGYNHSNSLTKADIENKVLVDSLAQLPKGALRNPVVEKVINQMINVVNAAAEAYGKPDEIHIELARELKSSAKEREQATNGIQAGNKRNQEIEQILKSKFNIQQPSKNDILRYKLYDELKENGFKTLYSNKYIPESALFSKDIDIEHIIPQALMFDDSFSNKTLEYKDINIEKGRTTANDFVKAKYGDEGYAQYCQRIEYLYSKGVISNAKRKYLLMTEADIPTGFVDRDLRNSQYIAVKSREILEDYVKVVVPTTGSVTDRLRQEWQLIDVMKEINFAKFRTAGKTYTAIDSEGRKTEKIKDWTKRNDHRHHAMDAITIAFTKPQHIQILNNLRAKCDSNEEFRQLLDSQTTDTGKKRIFTPPMPLDQLRAEVKKHLDAALVSIKAKNKVVTRNVNKIKQAGGILRKTELTPRGALHKEQVYGKRRVYEVFYSPVNAKMTEEAIAMVASPKEKEALLARLAEFGGDAKKAFTGKNSLDKNPLYVGAEQIPAKVKCVRFKDIYSIRKELSPDLSIDKILDKGVKAKVEERIQEFGGDVKAAFANLDTNPICLDNDKTIPIKRVTIGENFDLTAIRNKHDKDGRLILDKSGNPIPSDYVNLRNNHHIALYIDADGNVQEAVVPMFEALNRINMQIPVVDKNYHSDLGWTFLFSMKINEMFVFPDKNTGFNPKDIDLLDPANSSLISPHLFRVQKLSSKDYYFRHHLETTIGDDNSLRDITWKRIKTIQLMADAVKVRINHIGKIVAVGEYD

SEQ ID NO: 1948 - protein, 1225 aa, Artificial Sequence
  OMNI-126 amino acid sequence
MENVIKQRILGLDTGTNSLGWAVVDRLPLGGYELVDKGVQIFQEGVNIEKGTQEKSRAAERTSHRSLRKLYWRRKVRKIRLLTVLSNAGLCPSLTSQELRAWRMNGKYPLNNIAFMRWQLTDEQKGINPYAARCRCVEEELDMSSPDNRYLVGRAMYHIAQRRGFLSNRKDQTDDKDKESGAVKAGIKELTQKIHDAGCEYLCQYFYQLYQKGERIRSCYTDRKEHYEHEFDAICAKQHLDESLVQQLRKAIFEQRPLKSQRRGVAKCPFEPSKHCAPVSHPLFEEFRMWSFIRNIKMQTPEDAELRMLTNEEIDKVKHLWFRKSKANFPFEDIAKTLAGKGKYCYYKSAEDKPYRFNYYMDTSVAGCPVSAQLRDVFGEDLLKDRAQVDSIWLALDFFDDDLKLREWAIKHYNLADEQADAFVKIRLPQGYASLSLKAMENIVPLMRDHGMNYPNATLLAKLRDLTKDYPFEKDFDEDVEAYLKADIEEYLTIPTDKNGKPLMSREERKEALDVKWMQHYNLSAKEIKKLYHPSMIEEYRHVEHTTNGVYQLGSPRISALKNPMAMRSLFRMKAVVNQLLKDGTIDENTIIHIEFARELNDANRRAALRRYQAALRKEREDAVEAIKEFIPNPSDDDVLKYLLWKDQEGKCVYTGKSISLSALYNGTEFDIEHTVPRSMGGDTTRENLTICDAKFNREIKKNRLPSQLSEQAQELLQANIQTWKENCEALDKQLRKMKNATSGLSTKEAKDSVIAKRHLLEMQRDFWRNKYKAFTIEEKDVQGFTRRQGTDISVISRYGRLYLLSLFNRVDVVKGSMTAAFRKIWGIQTAYEKKNRENHVHHCIDAITIACMGKREYDELSAYYHADEENKYHSSDILMPKPWKTFTEDIKDIEQEILVAHYTSNPMGKQTKKKLRDSRGHIIRDANKQPRFAQGDTARGALHNDMIYGMIVNSQNVDDKHKVGNLCAVKRIILSSVASKDEEKMAASIVDPIIKKTVNDARAKYGSLSAAIEAEQENGDGSIWLNKEKNVKIKKVRCFQDFAINASPIRSLRDQSKKEYKRSHYSMTNGNFMSAIYEGTDAKGKKKRSFVIISLYEAAQAYGKHEPLVPTVSEEGYALIKTIRLGDLVLLYENSPEEIYTASQEELVKRMYEIIGMSDSKGLQIRLKHQQEARPNGELQQINGAFKNGDSAPIRMLLHTQFNALVQGQDFDISDTGKITFKSC

SEQ ID NO: 1949 - protein, 1109 aa, Artificial Sequence
  OMNI-127 amino acid sequence
MGKLVLGLDIGITSVGYGVIDIDNNKFVDYGVRLFKEGDSNDNEKRRSYRSGRRLRRRKKNRLDDMKSLLLSAGILTKDYKPLNNIYEIRVKGLTEKLTNNELAAALLHITKNRGTTVEALETADADKEAAGTKDVLAKNAKDLEQFEYVCKVQLYRLEKYGNIRGTENNFNTSDYVKEARAILKCQDIDVELSESIVNIISRRREYYEGPGSEKSPTKYGRWIEKGAEPIDLIEKMRGKCSIYHDELRAPKSSYSAELFNLLNDLNNLSINGEKLTQNEKEIVIEEVNNNGKITIDKLKKLLNINDSKDVVEGFRINKSNELLLTNMAMYDQFKKIFDKHKEDAYQRDKYIIDQIAEINTAKKGIKERCDAIEKQFPNFDYNLIRDLAEMKKMTQYHSLSLKAIREINKEMIKSPYNQMQAIHELGLQHYRKSYKGMKKIQVDEEAILSPVVKRAQRETFKVINRLREIYGEFESIVVETTRDKNSKEKKERINKTQKYYEDRNKKVDELLKERGYNPDTINNKTKMKVKLYLDQNGKSAYTMTPLKLNLIITNPHAYEIDHIIPLSISQDDSFNNKVLITHEENQVKGNKTPIYTYLNNQFKNCDINKYKESVKNNHNFSRKKKFYMLYEKDITKYSNMKEFIARNLVDTSYASRVVLNTLTSYFRDNDISTNVHTIRGSATSLYRKRIGLKKDRDKDFLHHAIDALIVASIKKQSIFRKYLIKYNLSELYNEKTGELIKVEEDSKVIDPVFIEFISNLKTIYEQSYQYYNGYISRNKMKFKPIKISHKVDTKPNRKISDETIYSTRNVNGVERVVKKVKDIYDPKFDKLTNDIINNQYHNKWIMAEKDEQTFEIIKSIVMAHFNTYKEDKDIYKSKSKKGVTTWSLKGSNNPLSQFKEEHGKIRKYSKKGNGPEITSMKYYEDELGNHVNITKKYNVDNKNVVLLQISPYRTDFYVSPKGKYKFVTIRYCNVFYKESNKKYLIDKKWYEEEKKKKKIDDSYQFVCSLHHDEILGVKLEDGKPYIYDESNENDEGLKRYHKGQYEILKFTATNDDKKNIIEIKPTYTYCQKQLKRSCGTFIKLTKFATDVLGNMYEVKDNVLKLEFD

SEQ ID NO: 1950 - protein, 1337 aa, Artificial Sequence
  OMNI-131 amino acid sequence
MVQDYYLGFDLGTGSLGWAVTDENYEILRAHGKALWGVRLFESAKTAEERRTFRTSRRRLNRRNWRIELLQGIFAEEINKIDDGFFLRMKESRYLPEDKKNKSGGVPQLPYALFVDKNYTDKDYHRQFPTIYHLRKWLMETKEIPDIRLVYLAFHHIMKHRGHFLLSGDIREIREFKTTFKQFIEVVKNEELDFTLEIEEEQYPNVEQILKNNQMTRTAKKTELIKSLKAASGCEKALLNLISGGTVKLSDIFGDKQLDESERPKLAFSDIGYDEYEGEIQSVLGEQYIIIEHAKAVYDWAVLADILDGQDSISAVKAALYEKHKADLVYLKKLVKENLPANIYKEIFTKTEEKISNYSAYIGMSKKNGKKQEIQGKRCSKDDFYKYLKKQVIERINDEKVTEYLKEEIDRGTFLPRQVIKDNSVIPHQIHLYELNQILSNLQEHIPLLKEQGEKIRKIFTFRIPYYVGPLNGVEKGKERTNWVKRKGEGKISPWNFEEIIDVEASAEQFIRRMTNKCTYLIHEDVLPKYSLKYSKFMVLNELNNLRLDGEPISVELKQKIYLEVFQRNRKVTQKKLKDYLIREGIAAKTVDITGVDGDFKSSLTAYHDFKEKLTGVKLEEEEKESVILNVTLFGDDKKLLKKRLKGLLPQLSDGQLTSLCNLPYRGWGRLSEKFLDSIVAPAPETGEVWTILRGLWESNDNLMQLLSEKYYFADAIEEENGKEGCKEISYQLIQELYVSPAVRRQIWQTLLIVKELCKVLGGPPKRVFVEMAREKTAKGRTQSRKSRLLELYKKCKTEENEWVEELNHTDESTLRGDKLYLYYVQKGRCMYSGERIELSELWDNQKYDIDHIYPQSKVMDDSLENRVLVKKVSNEEKSDRYPISENIRKKMQPFWKSLLDGNFITKEKYERLIRATEFEPEELAGFIARQLVETRQGTKAVASILKQVLPSAEIIYVKAPTVSQFRQDFKFVKVREMNDLHHAKDAYLNIVVGNVYFVKFTKNASWFIKEHPGRSYNLKRLFLADRVERNGEIAWVAGESGTIGKVKRTMEKNNILVTRRSYEVTGGLFDQQLMKKGKGQVPVKGSDERLRDLQKYGGYNKESGAYFVLVESEDKKGRKIRTIEYIPIRLKSKMKQDEELYCYLEEQRGLKNPKVLLNKIKTDTLFQVDGFYMWLSGRTENRLIFKGANQLLLPPKNVETLKKVLKFVARKKENKELKIFSADRIEKEMLLDLYDTFLSKLQKTVYGKRLGAQEKTLSDKRDTFRDLEIEEQCIVLSEILHMFQCQSGASNLKLIGGPENAGSLKINNDITKCRQINIINQSPTGIYEQVIDLQKV

SEQ ID NO: 1951 - protein, 1348 aa, Artificial Sequence
  OMNI-132 amino acid sequence
MSIKSDYFLGLDIGTDSIGWAVTDPEYHILRRKGKALWGIRLFDAANTAAERRTFRTSRRRIQRRRQRIRLLQELFAEEMVKLDPGFFQRLSDSAFWQEDKQEQQIYSLFTCENYTDVDYYREYPTIYHLRSALIQEKKEFDLRLLYLALHHLMKHRGHFLFNGSINNVTSFHTTFQTFADCLYDEFDIELECDSEDRFAEILKDKHARKTGKCSELEIICHIEKSNKQLKELFKLITGMKASLSVVFGDDELAEIEHNKISFSESSYDEVRLALEDEIQERTGILDIFHAVYSWAILADILEGGEYEGNSYLSVAKVSTYKKHGDDLRLLRTLVREYCPDHYKSFFSVSGKDNYCAYAGTLKKNGKKQPIKRCSQEDFYKALKKLLNQMPTDQPEVKDIFIEIENGTFLPLQVSKDNGVIPYQVNKMELEKILQNAEEYLPFLKNIDEECGKTVSKKIIDLFEFRIPYYVGPLNTAKGENCWMVRKEAGRIYPWNFDEKVDRDQSAEKFIRRMTNQCTYLIHEDVVPKNSLLYSEFMVLNELNNVKIRSEKLPVELKQAIVLDLFKKQKQITGKKLLNYLNANGYDVKKEDLSGFDGNFKASLSSYLTLKKVFGEELDKYSVQQMAEDIILWITLYGDDQKMLRRVIRKHYEQQLSEEQILSLSKLKFQGWGRLSRRFLSEMEGVDCETGECMTVMQGLRNTQNNLMQLLSQQFTFMELIEEENGNYYVDEITYDNLVKDMVISPSVKRAVWQTVQIVEEIKGVMGCQPKKIFVEMARSDEEKKRTVSRKDRLLEAYDAIKDEARQWQEELQKYSDGDFKAIKLYLYYTQMGQCMYTGRKIDLSQLNDATVWDRDHIYPQSKTKDDSLDNLVLVDRSVNAKKSDGMLSPEIQQRMRATWKYLKEKKLISEKKYERLTRVSPLTDEELAGFINRQLVETRQSSKAVATLLKRVYDEAEIVYVKAEAVSNFRRDNLDYIKVRDLNDYHHAKDAYQNIIVGNVFHEKFTSNPLRWLKNNPNTKYSLNQMFNFDLEKNGVVIWKRGKDGSIKCVEETLKRNDILFTRYAFCNKGGFFHQMLTAAPEDKTKAKGLVPIKKGMETWKYGGYTSVTPSHFMLVASKDKKGKEIRTIETVPLYRWKEFKENPDALLQYCREFYGLKEPKVLIPCIKKNARLVVNGFPMHLKGSTGRQLILQGAVQLCLDNENIKYLKKVTKYLECNAQRRDKRTLLEVREVTGINKEENIQLYDVFVDKLSNTIYQYRPANPKDVLIKGKDKFVELNLAEQCVVLGEVLHLFQCKLIGANLILIGASQHTGMITNGKKISNCISIKLSSQSVTGIKERVIDLLNI

SEQ ID NO: 1952 - protein, 1087 aa, Artificial Sequence
  OMNI-138 amino acid sequence
MKYIIGLDMGIASVGYATLLLDDKEQPCRILKMNSRIFEAAEHPKDGSSLAAPRRINRGMRRRLRRRRFRKEQIRDLIAEKGIMTTEEIDEIYNSGKELSDIYEIRAEALDRILSKEEFVRLMIHLSQRRGFKSNRKVDASDSKSESGKLLIAVKNNRELLSEKGYRTIGEMLYKDERFAANKRNKADDYSNTFSRAEYEDEINQIFEAQLALGNPYATDDFRKKYLDIYLSQRAFDDGPGGKSPYAGNQIEKMLGHCTFEENELRAVKASYSFEYFNLLSKVNAIKIVGEGGKRSLTDAERKSVIALAFAKNSVTYASLRRELKLPDGKFFNISYGKGDKSAEEVEKKTKFAYLTAFHTFKKAYGQAYVGWSTEKKNALAYALTVYKNDNKIIAYLTDHNFEKAEIEIALTLPSFTKTGNLSVKALDKLIPYLEQGMLYNEACSAAGYNFKADDASKRMFLPANAKDAPELEELRNPVVRRAVSQTIKVINAVIRECGESPTFVNIEIARELAKDFKDRKQIEREQKENQEKNEKLMERLRNEFHILKPTGQDLIKLKLWEEQDGRCPYSQKPISIEKLFDVGYTDIDHIIPYSICFDDTYNNKVLVLSAENRMKGNRLPMQYLGGKRQDDFRLWVNSAHLRKRKKDNLLRESYTEEDKSGWKKRNLQDTQYMASFMLNYLKKYLALQPSDQGRKNQIISVNGRATDYLRKRWGVQKIRENGDTHHAVDAVIIACVTQGMIKRISEYAKYKETAFQHPETKEYFDVDKKTGEVINRFPLPYPDFRKELDIRCSDDPIRLLRLYPLVQYSSGEEVKPMFVSRMPNHKVKGAAHMETIRGHFKEDGKDYSVAKVPLTSLKLKNGEIEGYFNPGSDMLLYNALKARLAQFGGDGKKAFSEPFYKPKADGSQGPLVKKVKIVNKSTLSVPVHGGTAVADNGSMVRVDVFYVENEGYYLVPVYVSDTVKRELPNRAIVAHKAYEDWKEMDENNFVFSLYPNDLIKLTFAKEMSFSLTNKGSSLPPEMKCKEIFAYYKGTNIASGTIGVINHDNTYGIGSLGIKRLPHIEKYQVDVLGNITKVGKEKRMRFR

SEQ ID NO: 1953 - protein, 1091 aa, Artificial Sequence
  OMNI-159 amino acid sequence
MNYIIGLDIGITSVGYAVLMLNDNDIPCRILKMGSRIFEIAENPKDGSSLAAPRRINRGMRRRLRRRRFRKEQIRNLIIQNNIMTNDEIISIYNSGKELTDIYKIRCEALDRELDKEEFVRLLIHLSQRRGFKSNRKVDASDSKSEAGKLLNAVKTNKTLMEEKGYRTIGEMLYKDECFADVKRNKADDYSNTFARSEFEAEINAFFDAQQKFGNEYANDEMRDSYLKIYLSQRAFDEGPGGNSPYGGNQIEKMLGKCTFEPDEFRSVKAAYSFEYFNLLTKVNSLKLITPEEKRFLTKEEKDKIINLAFSKKTISYASIRKELGILADTYFNISYGKGDITPEETEKKTKFTYLNAFHVFRKAYGDVFLNWSKDKKNSLGYALTVYKNDSKIVDYLNNKGFDKAEIDIALTLPSFSKTGNLSIKALDKLIPFLEQGMLYNEACAAAGYNFKNDDTSKRKFLPANEEDAPELGDIRNPVVRRSVSQTIKVINAIIRKYGESPTLVNIELARELSKAKKDRDKIEKNQKDNRSRNEAIVEELKNTFHILQPTGQDVVKYKLWKEQDGICPYSLKSISLDKLFDVGYTDIDHIIPYSVSFDDTYNNKVLVLSSENRQKGNRLPMEYLKGKKRDEFWLWVDNSNLRSRKKKNLLKEQITEEDISGFKKRNLQDTQYISRFLLSYLKKYLELQPNGSAIKNTIKAVNGAATAYVRKRWGINKIRENGDIHHAVDAVVIGCITNPMIKKISEYSKYRELEFVNPHTDEILDIDTRTGELVNRFPMPYDWFRDEFIMRTSSDPTRVLHEKPLPNYATDEEVSPIFVSRMPKRKVSGAAHKDTIRRKYVNEVGLEYTVSKVPLSSLRLKNGEIEGYFNPSSDMLLYNALKSRLAMYDGDGKKAFADSTEPFRKPKHDGTDGPIVKKVKIQNKATLSVQVQNKTAIADNGSMVRVDVFFVENEGYYLVPVYVSDTVALDLPNRAIVGGKPYSKWKEMDNDNFVFSLYPNDLIKVKSKRDMKFNLVNPDSTLAKNYTARESMLYYKGTDISTAAITAINHDNTYKLRGLGVKSLLSIEKYSVDVLGNKTKVNKEKRMGFV

SEQ ID NO: 1954 - protein, 1394 aa, Artificial Sequence
  OMNI-169 amino acid sequence
MSKILGIDLGTNSIGLAIRDTDKGETFVEQVDFFSSIIFKSGVGSGQAGEFSYAAERTKKRSIRRLYQSRKYRIWTTLALLIENGYCPLSIEDLDKWRRYDKEKGLKRQYPIEAIQFEQWIRLDFDGDGKPDYINPYELRAEIMQKQFDFNEEINRYKLGRILYHITQRRGFKSSKGETLKELSENEINEDLDLSVALQKSEEKKSQKLKDFMKEHNIPTVGWAFYELTKRGIRIKESEYQAVRIQYKEEIQKIFEFQEGLDTTSDFYKHLMSEKKGEGTIFYKRPLRSQKSKVGTCTLETGKSRCPISHPEFEEYRAWSFINNIKYRTSTTAEWKTLPLNLKQELFKDKFLRTKSYFKFEEIKNWLSSKLCLQLEYTNKKETSTINYKDKTNVVGCPISARLKNILGEDYKQWKFNSDKERTNRKTGEVHRITYDYLDIWHICFSFDEAEFVEEFAKCTLKLDDKQAKKLCTLHNNIQQEYASLSLKAIRNINPFLQKGLIYTDAVLLAKLPEIFKDKWNEVENDIVAAIDDIIKENRYEKGILDIVNDLIANYKSLDYGERFAEHNTEYILQSQDYTDIESKLKGHFGERTWNAKPCEEQEQIRKDVRELYQIFFGSSSRGYFKQPKVSESLAEYLKKQYTYLNDDDLKKIYHPSMIEFYPKVKPTLLDDNKYVKLLGSPVIGALKNPMAMRILHTLRTQINQLIKEGKIDEYTKIVVETAREVNNTNKRWAIEEYQRKQEEENKEVEKIIRQYYQKDNISDDEIKKAKILLDQFDVEKDNKQEKKQDTQSDKLSDTWSKVKSNNIKRYKLWLEQNCCCMYTGKVIRISELFDNDKFDIEHTIPRSISFDDSLSNLTICDSHFNRSIKKNQIPTQLDNYNEIKSRLELWKQKVKSLKERVEYWKEQSKISQTKDRKDQCIKQRLLWQMELDYWEKKLASFTIKEFIDGFRNNQLNDTRIITKYAFHYLKTVFEHVSVQRGEITSNFRKIVGIQKEDEKKDRSNHSHHAIDAAILTLIPSAKQRNRILETFYQMKESKETNNKDKLEKTTKELEKAKRAALIPNAVAAIKDHIEQNIFVNHISKDQTLTPAKRRKRIRGKIDKNKQWIITGDCIRGSLHKDSFYGCILIDGKKYFVIRRALKYKANDKDKGFKTWNELENAIVDKALYRRLVKPFCQEGAEEPSIDFKTVMLEKGGLYDNGIKVRHIRCYTSVKNPLQIKKQTYKSKQGYKNYYYAEVGDLYTMCKYENKKTGEIVYQPYNLFEVAANHKITHEFIPSKYDDKVLTQQLVKGDMLLIYKDNPNELFEMDNVQLSKRLYVIDGFERKSCLTKLIRSSNAQQDKELGKGESIKDFNNLPQKIRQSINKLHYLLRGIDFKIINGRIEFLNKTKYYD

SEQ ID NO: 1955 - protein, 1489 aa, Artificial Sequence
  OMNI-173 amino acid sequence
MKNILGLDLGTNSIGWAVISHDGMCYSGIKCAGSRIIPMDAATMGDFDKGVTKSSASERTQQRGIRRLNERSLLRRERLHRVLDIMGFLPEHYSRNLTRYGKFISEKVKLAWTDEGRFLFDASFNEMLHEFRSQHPSLMESGKKIPYDWTVYYLRKKALSYPINKFELAWILLNFNQKRGYYQLRGEEDDEKASNKQEEYMSLKVLRVEDSGEKSGKYTWYRVHLDNGMIYNRKSNIPLDWVGKERDFIITTELNNDGTPKTDKEGNFKRSFRSPSENDWTLIKKKTEADIEKSQKTVGTYIYESLLQNPTQKIRGKLVRVVERKFYRSELKLILEKQCRFLPELQDAALLQACLEELYPHNRMHRDIISNKGFTSLFIDDIIFYQRPLKSKKSLIGNCPYEWHSYVDKTTGKTKTVYNKCIAKSHPLYQEFRLWQFLSNLRIYSKGTYEQDVTTRLLPDQESYAALFSWLNDRTSIRQKDFLNYSGFKLTKTEQKNYRWNYVEDKTYPCNETHGEILKRILDCNLPEIFLTKERELSLWHILYSVEDKEQYKKALEKFAEKNSIDSADFVAAFEKATAFKKDYGSYSAKAISRLLPLMRRGRFWSEEKIDKNTLERIEKLINGEYDEQLCEQAYEGVAGLSDVSQFQGLPVWLACYIVYNRHSEATDVSRWESPDDIDKYLSDFRQHSLRNPIVEQVVLECLRTVRDIWRQVGHIDEIHVELGREMKNPADKRKKMTESILENEKANLRAKAMLMELMNPEMKVEGVRPHSPGQQELFRIYEENVLNSEKVPDDITEILAKFNQTDNAKRPTSSEVNRYRLWLDQKYRSPYTGEMISLSKLFTSAYEIEHIIPQSRYFDDSFSNKVICESEVNKLKSNLLGHEFIKKHQGEKVQLSMGKTVEILSVEAYEKFVNEHYSYNRVKKEKLLMDDIPEKFIERQMNDSRYISKLVKALLSNIVREEGEKDATSKNVISCTGGITDRLKKDWGINDVWNGIILPRFIRMNEIDKTNSYTAINTSGNIIPDMPFEYQRGFSKKRIDHRHHAMDAIVIACASRNVVNYLNNSSAAKESEAGRIDLRNKLCNKNYTDDKGNYKWIIRKPWETFTQDVKETLQDIVVSFKQNLRIINRTSNRTLHIEADKKKLQRQTKGDNWAIRKPMHKDTVFGEVNLQRVKEVSFKEVLKPEYSIVNRDLRKKVLSLQASGYDVKQMMKYFESEKDVWQDADFKKIKVRYFTKTTNDRYFATRKPIDSSFNKKKIEESITDTGIQKIMLRHLENMDGNPDLAFSSDGLDEMNKNIRALNNGRFHQPVYKVRIYEKADKYAIGEKGQKAKKFVEAAKGTNLFFAIYENETVDKSTGEILRKRSFTTIPMNIVMNRLKQGLSPVPANDCGKDAKYVLSPNDLVYVPTKDELERGVDGTTLDKDRIYKMVSSNNYQCFFVKNSVASPIVNKMEFSSQNKMERAVTGEMIKEICIPLKVDRLGNIIKMG

SEQ ID NO: 1956 - protein, 1489 aa, Artificial Sequence
  OMNI-174 amino acid sequence
MKNILGLDLGTNSIGWAVISHDGMCYSGIKCAGSRIIPMDAATMGDFDKGVTKSSASERTQQRGIRRLNERSLLRRERLHRVLDIMGFLPEHYSRNLTRYGKFISEKVKLAWTDEGRFLFDASFNEMLHEFRSQHPSLMESGKKIPYDWTVYYLRKKALSYPINKFELAWILLNFNQKRGYYQLRGEEDDEKASNKQEEYMSLKVLRVEDSGEKTGKYTWYRVHLDNGMIYNRKSNIPLDWVGKERDFIITTELNNDGTPKTDKEGNFKRSFRSPSENDWTLIKKKTEADIEKSQKTVGTYIYESLLQNPTQKIRGKLVRVVERKFYRSELKLILEKQCRFLPELQDAALLQACLEELYPHNRMHRDIISNKGFTSLFIDDIIFYQRPLKSKKSLIGNCPYEWHSYVDKTTGKTKTVYNKCIAKSHPLYQEFRLWQFLSNLRIYSKGTYEQDVTTRLLPDQESYAALFSWLNDRTSIRQKDFLNYSGFKLTKTEQKNYRWNYVEDKTYPCNETRGEFLKRILDCNLPEIFLTKERELSLWHILYSVEDKEQYKKALEKFAEKNSIDSADFVAAFEKATAFKKDYGSYSAKAISRLLPLMRRGRFWSEEKIDKNTLERIEKLINGEYDEQLCEQAYEGVAGLSDVFQFQGLPVWLACYIVYNRHSEATDVSRWESPDDIDKYLSDFRQHSLRNPIVEQVVLECLRTVRDIWRQVGHIDEIHVELGREMKNPADKRKKMTESILENEKANLRAKAMLMELINPEMKVEGVRPHSPGQQELFRIYEENVLNSEKVPDDITEILAKFNQTDNAKRPTSSEVNRYRLWLDQKYRSPYTGEMISLSKLFTSAYEIEHIIPQSRYFDDSFSNKVICESEVNKLKSNLLGHEFIKKHQGEKVQLSMGKTVEILSVEAYEKFVNEHYSYNRVKKEKLLMDDIPEKFIERQMNDSRYISKLVKALLSNIVREEGEKDATSKNVISCTGGITDRLKKDWGINDVWNGIILPRFIRMNEIDKTNSYTAINTSGNIIPDMPFEYQRGFSKKRIDHRHHAMDAIVIACASRNVVNYLNNSSAAKESEAGRMDLRNKLCNKNYTDDKGNYKWIIRKPWETFTQDVKETLQDIVVSFKQNLRIINKSSNRTLHFEEGKKKLQKQTKGDNWAIRKPMHKDTVYGEVNLQRTKEVSFKEALKPDYAIVNRDLRKKVLSLQASGYDVKQMMKYFESEKDVWQDVDFKKIKVRYFTKTTNDRYFATRKPIDSSFNKKKIEESITDTGIQKIMLRHLENMGGNPELAFSSDGLDEMNKNIRALNNGRFHQPVYKVRIYEKADKYAIGEKGQKAKKFVEAAKGTNLFFAIYENETVDKSTGEILRKRSFTTIPMNIVMNRLKQGLSPVPANDCGKDAKYVLSPNDLVYVPTKAELEHGVDMASLDKDRIYKMVSADRSNSHFVKESVASPIVNKVEFGSHNKMQCAVTGEMIKEICIPLKVDRLGNIIKMG

SEQ ID NO: 1957 - protein, 1489 aa, Artificial Sequence
  OMNI-175 amino acid sequence
MKNILGLDLGTNSIGWAVISHDGMCYSGIKCAGSRIIPMDAATMGDFDKGVTKSSASERTQQRGIRRLNERSLLRRERLHRVLDIMGFLPEHYSRNLTRYGKFISEKVKLAWTDEGRFLFDASFNEMLHEFRSQHPSLMESGKKIPYDWTVYYLRKKALSYPINKFELAWILLNFNQKRGYYQLRGEEDDEKASNKQEEYMSLKVLRVEDSGEKSGKYTWYRVHLDNGMIYNRKSNIPLDWVGKERDFIITTELNNDGTPKTDKDGNVKRSFRSPSENDWTLIKKKTENDIEKSRKTVGTYIYDSFLQNPTQKIRGKLVRVVERKFYRSELKLILEKQCRFLPELQDAALLQACLEELYPHNRMHRDIISNKGFTGLFIDDIIFYQRPLKSKKSLIGNCPYEWHSYVDKTTGKTKTVYNKCIAKSHPLYQEFRLWQFLSNLRIYSKGTYEQDVTTRLLPDQESYAALFSWLNDRTSIRQKDFLNYSGFKLTKTEQKNYRWNYVEDKTYPCNETRGEILKRILDCNLPEIFLTKERELSLWHILYSVEDKEQYKKALEKFAEKNSIDSADFVAAFEKATAFKKDYGSYSAKAISRLLPLMRRGRFWSEEKIDKNTLERIEKLINGEYDEQLCEQAYEGVAGLSDVSQFQGLPVWLACYIVYNRHSEATDVSRWESPDDIDKYLSDFRQHSLRNPIVEQVVLECLRTVRDIWRQVGHIDEIHVELGREMKNPADKRKKMTESILENEKANLRAKAMLMELINPEMKVEGVRPHSPGQQELFRIYEENVLNSEKVPDDITEILAKFNQTDNAKRPTSSEVNRYRLWLDQKYRSPYTGEMISLSKLFTSAYEIEHIIPQSRYFDDSFSNKVICESEVNKLKSNLLGHEFIKKHQGEKVQLSMGKTVEILSVEAYEKFVNEHYSYNRVKKEKLLMDDIPEKFIERQMNDSRYISKLVKALLSNIVREEGEKDATSKNVISCTGGITDRLKKDWGINDVWNGIILPRFIRMNEIDKTNSYTAINTSGNIIPDMPFEYQRGFSKKRIDHRHHAMDAIVIACASRNVVNYLNNSSAAKESEAGRMDLRNKLCNKNYTDDKGNYKWIIRKPWETFTQDVKETLQDIVVSFKQNLRIINKSSNRTLHFEEGKKKLQKQTKGDNWAIRKPMHKDTVYGEVNLQRTKEVSFKEALKPDYAIVNRDLRKKVLSLQASGYDVKQMMKYFESEKDVWQDVDFKKIKVRYFTKTTNDRYFATRKPIDSSFNKKKIEESITDTGIQKIMLRHLENMGGNPELAFSSDGLDEMNKNIRALNNGRFHQPVYKVRIYEKADKYAIGEKGQKAKKFVEAAKGTNLFFAIYENETVDKSTGEILRKRSFTTIPMNIVMNRLKQGLSPVPANDCGKDAKYVLSPNDLVYVPTKAELEHGVDMASLDKDRIYKMVSADRSNSHFVKESVASPIVNKVEFGSHNKMQCAVTGEMIKEICIPLKVDRLGNIIKMG

SEQ ID NO: 1958 - protein, 1442 aa, Artificial Sequence
  OMNI-185 amino acid sequence
MKTILGLDLGPGSIGWALVNVENGKPKSIIKAGSRIIPMDAGEMSDYESGKLQSSASVRTAFRGMRRLYERAALRRERLLRVLNVLGFLPQHYRDQIDFGEHPGKFKNHGEPLLPYRKNEAGKSEFIFQPSFLEMLEDFKKNNPQVLDDGRLIPRDWTLYYCRKKALDREISREELAWILLNANSKRGYYQLDEEKTEKSNAEKEYRRAKVLDVERLEEDRKQKGFYFYKITYDGGLTQTRKCKMQPWRVGDEVDLIITTPLDKNGKPKKDEDGGIRQTLSSPKEDDWGLVMQKTQAGIDHSNCTVGEYIYNSLLENPSEKVRGGIVKTIERHYYMEELRKILESQARFIPELCDHELYMKCVRELYRNNEAHVNELKRGNIVDFLIKDVIYYQRPLKSKKSCIADCPYESYTYVDKETGEIKKRPLKVMPKSHPLFQEFRLWQFIRNIRITENEKIVDGRKYFGYDVTAKYLGTPEDVCRLYEKLSGYENIAESIVLKSLGLNAKMFKWNYGSKKEFPGLKTHHEFATRIAKLEKARELTQKEEYKLWHILYSVSDRDELEKALKHFAEECGFDGQSFYEKFKTVPNMRGDYASYSERAVKRLLQLMRSGKYWNEKEIDEATLKRINAIIEYGYSPYEEFSEFKRVDDFQYLQLSDACYVVYGRHSENADNSVWNSPEEIDEYIGGEFRKNSMRNPVVEKVVAETLKVVRDIWKTYGKPAEIHVEMARSLKDPNDKRKEATERMAANRKETIDVREKLQELKDEHKADNINPNSFIHILKYKLWKEQGGQSPYTGKSISIARLFTDEYQVDHIIPQKRYYDDSFTNKEVCESAVNLDKGARLAYEYILAEGGKEINVTINGKHEKIAILPKEQYEEWVKKHCVRENGIGRKGKNLMMTDVPASFNASQLNNTRYIARKTAEILSHIVREGSDPGARSKNIIMTNGSITDRLKKDWGLKQIWNELMQPRFERLNDKTQSNDYGEDVVDAHGRHYFQTKVPEGLAEKFDIKRIDHRHHAMDAIVIACTSLNHINYMNNLSGGEKERYDLRRVLCEKDSRAFLKPWETFTQDSREAMNNIVVSFKQNLRIVSRASNYYSHYVDGKKIIERQTKGEHFSIRKPLHKATYSGLVRLPYTKMEKIENTIDNPEQIVDKSIRKGLKEILVQYNGAADKKKIKKYFKDRDYKLNGVDVAKVEVRIVPEQAGHSAHRTVLGSITNRKQLDSITDSGIKKILLNHLENYGGNYEEAFSPEGISSLNDNIRQLNGGRDHKPVKCVRVSEKFSLKFPVGQSGSKIKTYVETEKGTNLFFAIYVDEEGTRVFETIPLNVVVERKKDHLPAVPECNEKGDKLLFSLSPGDLVYVPEEGEHIAMPLDPKCIYKMVSANSGVCYFVPQNVATPIADKIEFGIKNKSERDLNGNQIKKVCLKLETDRLGNIIKITGND

SEQ ID NO: 1959 - protein, 1260 aa, Artificial Sequence
  OMNI-215 amino acid sequence
MKILGLDLGIGSVGWALIETDDSRNPIRIIDMGCRIIPVSPDETKNFEKGSAETINGKRTFMRSARKRNYRYKMRRSLLKATLSALGMIDQKSEVALRSLSPMQLWQLRADAATPGKQITLAELGRVLMHLNQKRGYRHAKTDGNDSKQTQYVQGVNRNYADIKDLGMTIGQYQYSKLKESETHTAKGCSFVMHQIRDTVYPRQAYMEEFDTIMQVQARYYPAILTDEVIARLRDIIFFQRPLKSCKHLVSMCEFESHVVHKKADGSAVTVGPKVAPRTSPIAQATRLYEAINNITIVNSANRGNKDVKLYDEADFFNGVVPVALRKKDYVYRLNAEERQRIFDYLNTNEKLTATTLLKLLGLKKSDGFVPDKAIGRGIKGNDTYVRIASALGDYPGKEELLKFDLDIVDSGVVNADSGEILSIVSADVIKQPLYRLWHLLYSVSDKDELAGALGKQFGITDPEVVDRLCAIDFVTPGFSNRSAKFMRKLLPRLMDGITYADAAGAIGVNHSGSITSADNAQRPLDDRLKLLEKNSLRQPLVEKILNQMINVVNALVERYGAIDEARVELARQLKQSSEERVRATQSISKNEKENADIEAKIREFGIRPSRSRIQKYKMWEESGKVCMYCGIEVKDKEFLESHDAEVEHIIPRSLYFDDSFANKTCACHKCNHDKGNRTAYDYMSSLGGDKFAAYEQRVDNLYADGKISRRKHSYLLMKQSEIPTDFIERDLRQSQYIARKALEILRGTIRNVWASSGAVTGFFRHAWGYDNILHDLNVDKYQLAGLVENEEYEHRGQKHVRARIKGWTKRLDHRHHAIDALTIALTTQGYVQRLNNLSSQHGNLFDDLTQENVELRDNSSLLTKWAATRPHFTVEDVASRVSEIAISLKRGVRLATPAKRYIRRGGKRVLSQTGIVVPRGSLHEESIYGRIRVYDGAKAYKDAFQNPHLVVNNEVREEIERRIADAGNDVAKALKALKKSPFTVVINGEQHTLDTIPCYREEIVLRYKVDGLKATDVKYIVDKAVREAVAERYDECGGNQKLFQNSVNADPICLKGSPMPIKSVRCMTGLNAGSLAGVRKDGSGKIIGLAKTGDNHHVAFYRDENGKECSMITSRWGAIRRKLNGIPAVVTDPAAAWVRLEYIADEAVAAEIAASLPMPGWQFIQSMRRNDMFVLGMGDEAFADAVAAGDQSTLARHLYRVQTISNSDYRFRGHTETTVDESNEAKVMKSVLRIQSSGALAALTPRKVKVSLTGEIIPL

SEQ ID NO: 1960 - protein, 1215 aa, Artificial Sequence
  OMNI-218 amino acid sequence
MSKKRILGLDTGTNSLGWAVVDQEENGQYTLIDKGVVIFQEGVKIEKGVESSKAAERTEHRALRRHYFRRRLRKIEVLRVLVKYNLCPTITEEDLNLWKLHKTYPRKDEFMVWQHTNDNEDINPYHCRYTCLNENLDLDRQQDRYILGRALYHMAQRRGFLSNRLDATEEDENGAVKSSIANLNKEIEENGCKYLGEYFYKLYKEKGNTVRIRTRYTDREQHYKKEFFAICEKQNLPKEMVEALTRALYFQRPLKSQRQNVGKCTFEKGKPRCSDSHPTYEIYRMLSFLNNVKIQGPWDEDLRPLNEEELKQIDKLFYRKSKPNFDFEEIAKKIAGKGKYQWKGDTKTDLPYKFNYRMSQGVPGCPTIAQLKEIFGENWKENIAETYTLNTKKDGTHKSADEMVDDIWNVLFFFDSKDKVKEYGIKHLQLDEDQADKFSKIRLSRNYASLSLKAIRYILPFLHKGMIYSDAVFFAKIPVIIGQSLWQKRQHEIMEDLSYAIHMAMKEKQRIDDAVKDYLQNNFDLKPGAADMLYHPSMIETYPDAQPDKNGVVLLGSPRTNAIKNPMAMRSLHEIRKVINTLIKEGKVAPDTEIHIEYARELNNANMRAAIHDLQREKDKKHKEYSENIRKLYKEATGKDIEATETDILKFQLWEEQGHICLYTGDEIGIADFIGANPSFDIEHTIPRSVGGDSTQMNMTLCNTHYNRFVKKAYIPTQLADHEFIMTRIEPWKEKIEDLTKQINQIRTSNIWDKAAKDAKIRKKNRLLEELKYWKGKYDRFTMTEVPEGFARRQGAGIGLISKYAALYLKSYFHDTLHPEHRQVYSIKGTITSDFRKMWGIQEEDEKKSRDSHTHHCIDAIVIACIGKNEFNMMGQYYHVQEKFEKGEGEKPEFKKPWPTFTQDLKKIKEELVVVHDTPDNMPKKATKTIEISKGRKVVAKGDCARGSLHQDTYYGAIERDGNIKYVVRKPLSSFTSIKDLDNIVDDAVRQAILNAIEGKDFKKALAEPIYMNKDKGILIKKVRCYTPSITKPLHIRTHRDISQKEYKQQFHVALDSNYCMAIYEGEVKGKTKRTYEIINMLDAAAYFKKSSNLAKQHPIAPENKNELKYRCSVHTGTQVLLLQSDGENINLENKDDIARRLYHVAVMRSDGRIVLRYNQDARDATTLKKERKSGAYKVGEQYRSEIMLSLSDFHALVEGYDFTITPLGEIKLKH

SEQ ID NO: 1961 - protein, 1357 aa, Artificial Sequence
  OMNI-231 amino acid sequence
MNNKEYFLGLDIGTGSVGWAVTDTQYNLIKINRKYAWGAVLFDTAKGAEERRVNRCARRRYQREKQRINLLQELFEEEIYKVDSGFFHRLNESRYVYADKRDEKGEKPELPYSLFVDENYTDVDYHREFPTVYHLRKALMTEDRAFDVRLLYLAIAHIIRNRGHFLSNMGMDEVNLDFSKIFGDLMNCWKENMEDESRNSVLELENETIENIEKIMKNSELTKTAKKQKILEELSGFSKEFKELIALITGGKVSLAKLFDKKEYDTLEIDKICFDEASFEENEEIYATNLDDYFEIITKAKAVYDWMILSNIFKDDKSGYLSCAKVADYEKHKRDLKNLKEAIRNDSIGDEEDKRNLYKQTFGVPKKGEENYSKYIGMTASKGSKFVIDGAKCSKYDFYKFVKKNIIPKLKDGELKEYIEKEISLESFMPKTRVKENAIIPYQIHAKELKKILECAEAYMPFLKERDDSGKTVSEKIMMLLTFRVPYYVGPLNTASSQAWVKRNGTGRVTPWNFETMINVDLSAEKFIERMTSKCTYLKNEKVLPKSSLVYEEYMVLNELNKLQIKSEPISVELKNDIYHDLFERKLKVTLKKLVDYLKREKGYTDITKEDISGIDIDFKSSLKSYHAFKREFTDVNLSESEKEDIIKDMTLFGAEPKLLKKRLYAKFPDYESQLNSLIKSLNCNGWGRLSYKLLNGIAVEIPGQGMVGTVLYQLRNTNNNLMEILEKSGSPYAKLIEEENKTDDSHKINYELVKELYVSPATKRQIWKAIQVVEEISHAMGHPPKRLFVEMAREHMESKRSITRKNKLLDLYKSIKNEKELYEELKGQPEDKLRSDKLYLYYTQFGTCAYTGKKIELSELFNNNLYDIDHIYPQSKTADDSLDNRVLVCKDSNGYKSDVYPIDSDIQKKMWNIWYLWYSKGLISKEKYKRLTRTSELTNDELTGFINRQLVETRQSTKEIMKLMRQLLPDTELVYSKAGNVSRFRQKYKILKVRELNDYHHARDAYLNIVVGNAYHLRFTKDIRNYFMKYGTYRTYNLKKMFEKDITFQEEVAWRAGERGTIQTVLRFMNCDKVLVTRQTFERKGALFDVQPKKKGEGQVPIKSGINNERLAVIEKYGGYNGATISYFTLIEGLKNNKNKKRYIIPVPLYLCHKIEKDELYAKQFFEKESKLSNIRIIRKILIQTLMIDEGFKMRLAGKSGTQLIFHNSNELSLNKKHFKCLKEIEKFILDRKDKPDATINEKSELAGNQMLDIYNIFIDKLMNSVYSKELGKHGEFLNNGLEQFNKLSLEDQAIQLHELLKFFQCTPEMPDLSRVGGSKSIGAIRSSMDVTKRSKLAIIHQSVTGIYEKIERINE

SEQ ID NO: 1962 - protein, 1411 aa, Artificial Sequence
  OMNI-247 amino acid sequence
MAKYRIGLDVGTNSIGWAVTDLNNKLIMKKGKKLLGVLMFKESSGGDKDPNKLRRTYRCSRRRIRRRKERLNYLNEIFAPEINKIDPTFFERLDESFLKLEDRKYKDKYTLFIDKNFNDKTYFKKFNTIYHLQKYLMESEKKEDIRLIYLAIRHLIKYRGNFLNSSNPDNYSSKIDELDFLERLTRVFEIINSYEIYSKFNKPILDINDIKSLIKANKDSKGINSKKENFIKIFNKEEKKNNLIDFVASLLAGSSVELNKILKKDEDGPQNSIKISFTDDLTEKFLELRSEYPEYDDFISSIEDLYRLYQALYINKYVQNSLPQTMVERFNTYKTDLKLLKGYIRKYYSTKYDEVFNSIENKMSYPHLVRHYCSDIDKKTKVNISNDKSFSRIEFINYLKNEFSFDQDDELTLKLKERINSDDFLLTQSDKSNGNFPYQLNYFVLKKIIINQEKFYSFFDEKDSNGYVNKDKIISLLTFKIPYYIGPLSNNYDESDENNHAWIIRKKEGHIRPWNFDEIVNVEDSAKKFIQRMQNKCTYLINEYCLPKDSITFQKYLVYQQLNTLYVNGKFYFNSDNKDDLIINLYSKNRKITKKLLQDYLSNKLKEKVVITYKNGKDKDVEPNLHSLSSLFDFIKVFGSYEEVDKNIDLIENIIRDIAIFEDKSILASRLENEYKLNKDQIRIIKSFNYNKFSRLSKKLLDGIKPFDKNGVLINKTILTILKDYDGSENKPATLMEILNSKDSEYDFDSVIKIENSKEEENESVDSFIENSYLPKISKRPTILTCRIIEELAHALKANISEDFEFYIECARTNKSDKKATKTRYEKLMETLSKSGLKSQVDSLINELKKYENDKSKLNAESLYLYFMQLGKDMYTGDQIDLNTIIENYDVDHIIPRSLIKNDSLDNKVLTEKKFNNGKSNIYPLSKIDLWEYNGGRKKALEFYKKLKDNNLISERKYIALTANTDLDNDTLEGFANKQLSTTNQSVIGLKEVFEDYYSINSENIILSKAENVSDFRNNFDLVKSRTANNFHHAQDAYLNIFVGSAVNSWIKNIFKLWRIDESNEHKYSDFVSFVREKRYTLNPIKIMEKYVKDQSDEFNELKDVIYNYKFIFTKTRTYIKKDFFPKSTVYAANSCANINTKNNLDCKKYGGFKEYAFGYYVLIKTKDNKFILEPVPYIFSKNANQYLDNLYKKNYEIYLDNVKINTKFQIEKRQFIITGKTVNSYLVRNSIERFFPYDLIKIIKKVDNFMNFLKLNKIAINVKNQESINKAIDDLNNLHKIKDKNNELISKENKFGEIETLTSNELINVFDYLFTLYSKDAFSYSFSKALIYEQEELKNKFMNLDILLKTYTISEMLNYLKTNERKKINLIKLDKEENCGKLTQNKVLPLGTKIIFESNTGLYKKEIILK

SEQ ID NO: 1963 - protein, 1411 aa, Artificial Sequence
  OMNI-250 amino acid sequence
MAKYRIGLDVGTNSIGWAVTDLNNKLIMKKGKKLLGVLMFKESSGGDKDPNKLRRTYRCSRRRIRRRKERLNYLNEIFAPEINKIDPTFFERLDESFLKLEDRKYKDKYTLFIDKNFNDKTYFKKFNTIYHLQKYLMESEKKEDIRLIYLAIRHLIKYRGNFLNSSNPDNYSSKIDELDFLERLTRVFEIINSYEIYSKFNKPILDINDIKSLIKANKDSKGINSKKENFIKIFNKEEKKNNLIDFVASLLAGSSVELNKILKKDEDGPQNSIKISFTDDLTEKFLELRSEYPEYDDFISSIEDLYRLYQALYINKYVQNSLPQTMVERFNTYKTDLKLLKGYIRKYYSTKYDEVFNSIENKMSYPHLVRHYCSDIDKKTKVNISNDKSFSRIEFINYLKNEFSFDQDDELTLKLKERINSDDFLLTQSDKSNGNFPYQLNYFVLKKIIINQEKFYSFFDEKDSNGYVNKDKIISLLTFKIPYYIGPLSNNYDESDENNHAWIIRKKEGHIRPWNFDEIVNVEDSAKKFIQRMQNKCTYLINEYCLPKDSITFQKYLVYQQLNTLYVNGKFYFNSDNKDDLIINLYSKNRKITKKLLQDYLSNKLKEKVVITYKNGKDKDVEPNLHSLSSLFDFIKVFGSYEEVDKNIDLIENIIRDIAIFEDKSILASRLENEYKLNKDQIRIIKSFNYNKFSRLSKKLLDGIKPFDKNGVLINKTILTILKDYDGSENKPATLMEILNSKDSEYDFDSVIKIENSKEEENESVDSFIENSYLPKISKRPTILTCRIIEELAHALKANISEDFEFYIECARTNKSDKKATKTRYEKLMETLSKSGLKSQVDSLINELKKYENDKSKLNAESLYLYFMQLGKDMYTGDQIDLNTIIENYDVDHIIPRSLIKNDSLDNKVLTEKKFNNGKSNIYPLSKIDLWEYNGGRKKALEFYKKLKDNNLISERKYIALTANTDLDNDTLEGFANKQLSTTNQSVIGLKEVFEDYYSINSENIILSKAENVSDFRNNFDLVKSRTANNFHHAHDAYLNIFVGSAVNSWIKNIFKLWRIDESNEHKYSDFVSFVREKRYTLNPIKIMEKYVKDQSDEFNELKDVIYNYKFIFTKTRTYIKKDFFPKSTVYAANSCANINTKNNLDCKKYGGFKEYAFGYYVLIKTKDNKFILEPVPYIFSKNANQYLDNLYKKNYEIYLDNVKINTKFQIEKRQFIITGKTVNSYLVRNSIERFFPYDLIKIIKKVDNFMNFLKLNKIAINVKNQESINKAIDDLNNLHKIKDKNNELISKENKFGEIETLTSNELINVFDYLFTLYSKDAFSYSFSKALIYEQEELKNKFMNLDILLKTYTISEMLNYLKTNERKKINLIKLDKEENCGKLTQNKVLPLGTKIIFESNTGLYKKEIILK

SEQ ID NO: 1964 - protein, 998 aa, Artificial Sequence
  OMNI-266 amino acid sequence
MKRRVFGFDLGIASIGWAVVEFDNEYYDMETGEILADKVNGSGEIAQGTIVGCGVRTFPVAENPKDGSSLAAARREKRLARRACRRKARRKKGLQGLFAAKGLAESPAAFTDEICMRQIGGDVWNLRVKALQEKLSKEELARVLYHLANHRGFKSVRKAQEENDKDSGKVLSAIRANMALKEDGKSLAQIIVEKAGETGKKRNFSKVVKVNKKGEDVKEADYRNSIPRSEIEAELAMIFTKQKEYGIFTQDLYDDFVKIAFRQRGIKSVGDMVGNCTFEKDEKRSPKEAPTAEFFVAWSKINNLAVYEGDKKRELTPEERQTLFDVLKVTKDIKYKTIRSKVFKGKDIQFTCLNYSPKQKKNKNGELVTIDPEDVLFYNMKGWHKLQSIFKAEYSDIFNDIKKLDKAVTIIATEKEDVKIQEKLQELGYSQEKIDKFLTLSFDKFINLSLKALYKINPYLEKGEKYDKACANAGYDFKEITDKLVNEKGLLLAVIDKEKLTKVPVVNRTIAQFRKLYNAMVRQYGAPDQINIETGRDLKKSAEERKKIQKLQEENRDKNQSIKKQLLEWGVKDNGTNITKLRLYNEQQGKSIYSGNEIKIEQLFDDGYVEIDHILPYSRSWNNSQSNKVLVLARENQEKGNQTPFEYIGKSDAKSKEWTDFTSYVTSFASIEKHKKEKLLLETFNEREQEFRDRNANDNSYIALYVKRYLEDGIDFGKSLHTEIKNKVQVRSGNVTAFLRRQWGLEKDRTESDKHHAQDAIVIACAAQGMVQALSKISRKEGVVHTDAVHRKYAIAKPWDNFRNDVLTALEKVFVSRSPRKKASGEIHSETIYTLNEKKKQFEAKNAKSGFYVRGGIAGNGDMLRTDVFCKKNKKGKVQFYLVPIYKSNLGKELPNKAIVANKNEDEWTVIDESFSFMFSLFLDDLIKAQKDETVTFGYYKGVDRANAAITIEVHDRSQDNARIGTKTLDSIKKYQVNLLGEYFEVGGEKRQLLTHEE

SEQ ID NO: 1965 - protein, 1016 aa, Artificial Sequence
  OMNI-269 amino acid sequence
MKKILSLDIGISSIGNAVVELDDENFYGKILDAGVRIFSAAEQPSGDSLAAPRREARGARRRISRRSSRLYNIKKYLILNNFITQEQIENLYCSNKQIKDVWTLRKEALYRKLNNEEFYRILMHIAKRRGFKSIRKSEEAKKEGDLLKAIKQNYQEFENGQYKTIGEMFAEKDIKRNKREKYNNSIPRDLLQKEIEIIFETQRKLGSPLAKEETENFYLQTAFYQRPLQSMEDKIGYCSFEPDEKRAPKCAYTSEIFTAATKLVNLSITDELGECRVLCGDEIKQIIELAHKNTKVTYKQLKKELCLEDNILFNGLNYNKKDKNPEDSTLIELKNYHLIKKSIVNDKNLGKVYFEAIKYDKDLFNNIATVLTCEKSDESVIARMKEYFIDDKIIACVKDLSMSKTMHLSLKAMEKILPYMLEGYKYNEACELAGYNHHSISKNKTKQNFLPVLPQEELTTNPVVNRAISQTRKVVNSLIKRHGTFDYIIIEMARDLSKSFDERRKIKKAQEDFQNQKELARKRCIENGLNPDYPKSNLLKFRLWEEQGGYCIYSGKYIDPRKLSDQDYTDVDHIIPYSKSFDDSLNNKVLCLSDENRQKGNKIPYEYIGESKWYDFVQRIKTYNLKSAKYNRLIRKSYESEGFKSRNLNDTRYITKFIKDYIKENLDFGNNLKVETRNGSLTAFLRTQWGLIKNREENDRHHALDAIVLACSTQGMVQYLSTVSAKIENYNYTKDKKPRFKRPWATFKEDVELAISKIFVSRALRASVSGQLHDATIRSPKHLQDGFTVLKTPLEKINLQTLEKMYDKERNIKIYNLLKERLTKFNNDPKKAFEEPVYMPMSEEKLKQGQKPHLIKTIKIKDNSISGIKVHNGFAQNTSMPRVDVFTKKNKKGKNEYFLVPIYIADFGGELPNKAISTGKNRWIEITDDYTFCFSLYPNTLIAINPTGKPEDEFLGYYKGCDITTGTIKLDSHDRTIKDKRISTKTAAYIKKYQVGVLGDYHEVKHEKRLKLKGPK

SEQ ID NO: 1966 - protein, 1031 aa, Artificial Sequence
  OMNI-274 amino acid sequence
MVKILGLDIGISSVGYSVIELDENKFNGKFLALGARIFTAAEQPKTGASLAAPRREARSARRRLSRRSCRLYNIRRLLLEKQFITQTEIAEIYDTHEQLTDVWDLRKEALNRKLDNKELYRILMHIAKRRGFKSVRKSEEAKREGELLKSIAETTEEFKQGKYRTIGEMFALKYTNGEAKRNKSGNYNKSIARDLLRQEIEIIFEMQRKLGSTIANNEIEKGYKEIAFYQRPLKTIEIKTPCPFEPEEKRAPKCAYTSEKFSALNKLVNLRLINDLGDTRFLASAEIKDAVRLANKLSKVTYKQLRKELYLDDEIRFLNLNYTKTDSKGQQVDPETAVLIEFKNYHSIRKALECNGNLGKIYFDSIKDDEDFFDNIAYVLTCEKTDESIEEKLKEYGYSAGVIDSIKELSMSKTSHLSLKAMKKLIPYMLDGKKYTEACELAGYKTENQNTAKQSLLPELSQEELTVNPVVNRAISQTRKVVNALIKKYGILDSIIIEMSRDLSKTATERRNIQKLQEEFKSEKEKARQRCLENGLNPDFPKSNLLKFRLWEEQGGFCVYSGKHIDPKRLSEQDYVDIDHIIPYSRSFDDSLNNKVLCLTDENRQKSNKIPYEYIGEDKWYDFVQRVKSYHLKQPKVNRLTKKKYEQEGFKSRNLNDTRYIAKFVKDYIKENLDFGNNLKVETRNGSLTAFLRNQWGLIKNRDESDKHHAQDAAVIACSTQGMVKFLSTVSAKLENYDYSKDKKPRFKRPWETFNQDLEYELSRVFVSRAAKKSFRGELHDATIRSVKHLDKGFTTVKKPIEQIDLKTLEQMFDKERNYKIYNLLKERLEQNNNNPQKAFQEPVYMPLSKEKEAKGQKPHRIKSIKIKDTGTSGVLVRGGLAKNASMPRVDVFTKKNKKGKNEYFLVPIYVSDFGKELPNKAITSKKDCWLEINDEYTFCFSLFPDTLIAINPTGKPEDEFLGYYKKCNISNGAIILDSHDRSIKEKGFGSKKLVYIKKYQVDILGDYHEVKQEKRLGIKPKQKGQQKDGV

SEQ ID NO: 1967 - protein, 1054 aa, Artificial Sequence
  OMNI-281 amino acid sequence
MTNYTLGLDIGITSVGYGLIDTDTKSVIDAGVRLFPEANVENNEGRRSQRGARRLKRRRIHRLERVKRLLSNYHLMEESNPPHSTNPYQIRVKGLREELSKAELAVALLHIAKRRGIDNMSVDAEDDAPSDGVSTKDVLAKNANELSHKYVCELQLDRLLAEGKVRGEQNRFQTKDLIEEVKQLLTTQKNYHTFDDEFINHYIKLVQQRRAYYEGPGEPSPYGWGGNLKEWYEMLMGHCTYFPDELRSVKYAYSADLFNALNDLNNLVIQRDGVPYLEYFEKFHIIENVFKQKKTPTLKQIAKEIDVTPEDIKGYRVTKSGKSEFTKFKIYHDLKDILTHKEYLEDNDLMDEIAKILTIYQDSESIKEELEKLTELFTEEEKEAISQLSSYTGTHRLSLKCINYVLPDLWKTPYNQMELFTQLNLKPKKVELKNQNHIPTEIVDEFILSPVVRRSFIQSIKVVDAVIQKYGQPTDIIIELARENNSKEQRQFINKLQKQHDQTRHRIEEIMKQYNNENAKYLFEKIKLHDMQEGKCLYSLKDIPLEDLLRNPYHYEVDHIIPRSVAFDNSLNNKVLVRQEENSKKGARTPYQYLNSSDAVISYNQFKQHVLNLSKSKDRMSKKKRDYLLEERDINKFEVQKEFINRNLVDTRYTTRELANFLKTYFKINNIDTKVKTINGGFTNYLRKVWRFSKERNHGYKHHAEDALVIANANFLFKQHKALKEAEKVLNNPASKDESAIDVFNDNQYKELMAKNSVVDEIKDFKDFKFSHRVDKKPNRQLLNDTLYSTRNIDNHDYIVQKLTNIYDKDNKEVKKIVSEKPEKLLMYQHDPKTFKKLQTVMDQYAEEKNPLAKYYEEHGEYLKKYAKKGNGPAIKSLKYIGKKVNAHFDVTDKYPNPKNKLVKLSLKSFRFDIYKGESGYKMLGLSYLDVEKKDAYYRIPSEYYEELKKKKKINEGDEFIGSFYTNDLIKVNGEKYRVIGVNNSDRNIIEVDMPDIRYREYLELNNKKGTPRIFITIGKKINTIEKYSTDILGNLYKNERPKKPQLIFKKGVE

SEQ ID NO: 1968 - protein, 1080 aa, Artificial Sequence
  OMNI-293 amino acid sequence
MKYGVGLDCGIASVGYCVTELDFNDEPRRIIRLGSRIFDKAENPKDGSSLAQPRREKRGLRRRIRRHQHRLERIRYMLVQENIVSQAELDTMFKGKLSNIYEIRTRALDEPVSNIEFARVLINLAQRRGFKSNRKVDEETSDKETGKLLGAIENNKENIIQNGYRTVGEMLFKDERYSKYKRNKGEDYLNTVSRDMIADEIKAIFASQRSFGMPFANENTEHEYTDIVMSQRPFDLGPGEGNEKSPSPYAGNQIEKMVGRCTFFPKEKRAAKATYSFQLFSLLQGINNITLVDGNSNKYPLSAQERRILKEYCFNTANVTYASIRKKLGISTDYRFNNISYGENGIEESEKKTKFQHLKNYHQMKKILGDSINAFSHDELDEIGRIFTYYKNDSKIIENLKEAGIDESMYPSLLKLPSFSKMGHISVKACKMLIPFLDEGKTYNEACESAGIDFKAHSMATKQMYLPPKSDELEDIVNPVVKRAVSQTIKVINSIIREMGNSPTYINIELARDLSKSKKERDLIDKKYQTNRAANEQIKKEIADNFGFEAKGQDIIKLKLWHEQDGICPYTLKPIEYGKLFNDKGYVDIDHIVPYSACFDDSYNNKILTFSRENRQKSNRLPLEYLDESQKSKYRVWVNNNIKNYRKKQNLLKECLTENDKKEFKSRNLNDTRYLSKVLYNYINDNLLFDEFYDDRKRHVVSVNGAVTAYMRKRWGIDKVRENGDLHHAVDAAVISCVTQGMINQISKYSFDKETEFDVDTRTGEVLEQFPFPYREFRKELEARSEIEDEKRLKNVLLSLPNYSYDDVEVAKPAFVSRMPRHKVTGEAHEATIRSGKVEGYTISKIPLTKLKLKNGGIDKYYKPESDTLLYNALLQRLEEFNGNAEKAFAEEFHKPKSDGTPGPVVKKVKIIEKSSSNVKARNENKLGVADNGSMVRIDVFYVDGEGYYFVPIYVSDTVKPTLPNRACSRGKSGWKEMDDKDFVFSLYSNDLIRITAKKDMKFSLVNKDSTLPSNKFSNGELVYYITADISTASITVETHDGAYAFKGCGIKTLTNIEKYTVDPLGNASKVKKEKRMYFK

SEQ ID NO: 1969 - protein, 1081 aa, Artificial Sequence
  OMNI-295 amino acid sequence
MKIIGLDIGIRSIGWALQEDGEIIAKGIRIPRSVEDAQTKESLAAHRGAARRIRRTLYRRKARLSLLKRLICNEFGLNLADYHAKDGDLPKAFVADENTKSPYELRVKALEHKLNADEFARVILHIAKHRGYGNKHARKESDKDKGAVLSALKNNEKALTAYKSVGEYLYKEFYQKGRFITTKDENGKEVLERDEAHFGKVRNTTDVYEQCMRQEWLQAELELIFEKQRELGFKFSDEFKNKVLEIAFFQRPLKDTDDKVGFCTFFPDEKRAPKDSLSAIEYVALGKIINELKYIEKKWKKETGEELKGKICAPQNINDILKIVIEKGEISYKEFRSILKLDERVKIFSKNVKLDYTQKTIDEAEKAKFLELKATKDNLNIPNLKGFQNALKGSFEKFDRKTLDDIAFDLATINDKEKLFKELDKYDLSAEQKEALSNLSFSKFLNLSYKALNEIIPLMKDGLRYDEAVEKLGFKPSDEYDYDKVQKELHNPVVSHILAEVVKVLKAILKKHGQVHKINIEFTREAGISKEKRNKLENKQKSNFQANEKAKEMCNTLGIVASHKNILKIKLWKEQGGACVYSCNNGKGKTITEKDLQDETTLQIDHIYPYSRSFDDSYSNKVLVFTEQNQIKRERTPFEAFGSNTNKWNNIVSFVNGCKTMSESKKKRILNTEFKEREQGFIQRNLVDTSYIANVVRDYIDKNVKFLPLDEKELAQSTMFFELDSYNEKDDSKKAYKRKHIEIISGNLTSMMKHYWGLHFLDKKNEFGEYEKDRNHHLHHALDAIIISYMNASRVKAFADFKKNLETMKASEYAEKLSEIEKEQKRTKRKKSTFEVPSNYANRDEFERKIKEQIFGIFVSQPPNKKARGALHLDSFYSQSDTSVISSKDTMENALELGKVRKIGTKIVSNASMVRLDIFKRKKDDKFFGVPIYTMDFAKGVLPNKAVGSKEWIEMDSNYEFLFSIFSNDLLYVKKKGMEKAELCYYVKFDIGGGQISFKSHDNRLKSLTENQIKLYGTKDPTEERVRGRVGIQNLEIFEKWQVSPLGEVKKAEFKEREPIALKSTPKNSKLDKLNSKTERK

SEQ ID NO: 1970 - protein, 1097 aa, Artificial Sequence
  OMNI-308 amino acid sequence
MAYAIGLDIGIASVGYAVVALDYEENPWGIINMGSRIFDAAENPKDGASLAAPRREARTGRRRLRRRKHRIERIKNLFLNTQLLTKEQLEKLYEGVLSDVYELRVKGLDEKLTAEEVARVLLHLAHRRGFKSNRKAEKTDKENGALLTAVSENQKRMKDKQYRTIGEMFHKDELFAEYKRNKGGTYLTTVAREMIADEAKYIIATQRSFGNKTLTIEFEESYLDILLSQRNFDEGPGGNSPYGGDQIERMIGNCTFEKSEKRCAKSCYSFEYFNLLQKINHLRLLVDGVKVELDGSQKSKVINLAKTKADLKYSQIRKELGLGSQVLFNALVYNSDVEEVEKKSKFNFMPAYHQIRKELDTVVKGRIEAIDIDTLDEIGRILSTYKSDAKRIEAFSNLNITSKDMEALLNINGLRKFGHLSLKALKKITPFLEQGMIYNEACTAAGYEFRGHSGYEKTFLLPSQTEEMENVTSPVARRSISQSIKVINAIIREQGESPLYINVELAREMAKDFDERKKIKKETDENQARNERLIEKIRNEFHKQNPTGLDLVKLKLWEEQDGVSPYSQKQIVIERLFEPGYVDVDHIVPYSISFDDTMKNKVLVFASENREKGKNLPVEYLARKKGQKAVDDFKVWVTSNVRNYKKRLNLLKSEVTEEDLNKFKERNLQDTKTISRFMYNYISDHLIFAPSETGKKKRVTAVNGAITSYLRKRWGINKVRADGDKHHAVDALVIACTTDKLIKDLSYHSRYLEMEYEAGEKESLWVNRNTGEIVKRFPYPWEDFRAELMARLSDAPEVALRKLQLLYYQDKDLSKIKPIFVSRMPRRKITGAAHKATVRGARYVDKGIVISKKSLSELKLNKGGEIENYFAPESDRLLYEALKEQLKKFNGNAKKAFEQGFYKPKADGTPGPKVNKVKVYDKSTLNVAVQQGTGAADNDSMVRVDVYKVEGDGYYLVPIYVADTLKKELPNKAIVQGKTYEQWKEMSPEDFVFSLYPNDLIKITHKKEINFSRVSEDSTLADSYKTKEEFVYYKKTSISTASISIINNDNTYTIPSLGVKTLASLEKYQVDILGNYTKVGKEKLQTFAAYQQAKKKP

SEQ ID NO: 1971 - protein, 1098 aa, Artificial Sequence
  OMNI-309 amino acid sequence
MKHIRYTLGIDIGIASVGWAVLQNDVYGEPVKIDRLGVRIFERAENPKDGSSLAAPRRQARGSRRVIRRRKHRKDRIKKLIASSGMMEQEQIDTLFTAGRFEKSVYELRVDALERKLSVEETIRLLIHFAQRRGYQSNSKSEEAKDAKENGKVKQAISDNRQRMLEHGYRTVGEMFWKDDLFKRTNPDGSVVLVVHNQPDDYKVTVERQMLREELQLMFAQQRAFGNEWASEAFESAYLEIWGSQRSFDEGPGGNSPYGGGQIERMLGTCTFEEDEPRAPKASYTAEYFRLLQTVNHLKTVGRGLPPEFLDEEQRKLVVEFALASPNGTYGQLRKKLSLPDDVYFNNLYYGNKSAVEVEKKKLGLMPFYHKVRIALDHVKKGAIQEFSAEQLDKIARILTLYKSDDNRTQYLRKAQIPEQYIPELLALSASKAAHLSIKAMQKMIPYLEDGCTYDKACTAVYGRHDGKKPGEKRSQKLDIGMAGEITNPVVRRAVSQTIKVINAVVREYGPPEVVRVELARELGKPYEIRTKLEKRQSANFEQNAAIRSQIEEYKKDTPTGLDIVKFKLYQEQNGVCLYSGENLDISRLFEAGYVDIDHIIPYSISFDDSYHNKVLVRSRENRQKGNRIPYAYFGQDEVRWNRFETLVNTQIRSFKKRKNLLCHTLSPEQIDGFKQRNLVDTQYLSRVIFRLIDEHLEFAETGNVKRKTQTVNGAITAQVRKRLGIDKVRANGDLHHAKDAAVIACISPGMIQKITRYSQRCECAWTRAGYVDYETGEVMTKEAYDEKYAPRFPAPWPQFRAELEARLSVDPRGEIDQLKLATYDSDEALFPVFVSRMPNHKVSGPAHQETIRSGKQAGGTVSKVALSTLKLDKTGEIPGYYRPEDDPLLYEALKERLRAYDGKGDKAFAEPFYKPKHNGEPGPVVKKVKVFDKATLTVPINHGLAANGNMVRVDVFRVEDEGYYFVPIYVADTVKGELPCRAVVAHKAVEQWKGMDEKDFVFSLYAGDLVHIVNHKAIKLNLAKGAEGNEVALTNDALLYYTGLNIATGALGLTTHDRRYCQSGLGGKTLDLIEKYQVDVLGNYTPVRLPEKRMRFQ

SEQ ID NO: 1972 - protein, 1145 aa, Artificial Sequence
  OMNI-322 amino acid sequence
MDKLYRIGFDIGVGSVGYAVLENDPVTEDPIKILKLGVRTFSPNEVKDTGASTATARREKRGVRRRARRKKLRMQKLKVLISSQLQIDVNQMQNNLINKDVYELRAKALDEKISNDELAKIILNIAKYRGFKSNRKSSKASGDDGKLLKAIEKNNKFIKDNGYRTWGEAVYKDKNFKITVAGNDFYNVRNHGGDYKNCVQRSDLEEELRLILKKQQEFNNLITDDFIELIILVFSRQRNFDIGPGKQSPYFKENGFADDVGYCTFYEEEQRAPKASFTFEYFNALSKINSLKIGSEFLSLEQKQKLYEEFKIKKELSFAQIRKMFNFDDEKSFNLCRYKTLSKKEREGLNQEEIVNKNKELFFDSEKKQKLASMEHSYDIKKALGYESSYDNRELIDEIAYMLSVYKSEERIDAYLKSNDKGLFTLLNEEQVSKIKELKFDKFASLSLKAMNEIIPYLLEGLRYDLACEKAGFNHSSFKFEKLKYLKGDKIKAEFKDLTSNVVKRAANQTLRILNEIIKEYGSPQFVSIELARELSQLPSERRKSSDLMIANQDKNEQLKERLRSEFNLINPTGRDILTLKLYEEQNSKSMYTGTKIEADRLFEPNYVQIDHIIPYSRCFDDSYNNKVLVIADENQNKGDRTPYEYFGNDEQRWNEFIVRANLLHNAKKTRNLLKKNFSQEESNEFINRNLNDTQYVSKFLLNLFQKYLMLTPSKKFKEIKQIKCVSGSVTSYLRKCWGIKKIREDGDIHHCVDAAIIASVSEGTVQKITTFNKFKEKFFFDKKNERFISKKTGEVMTAEEKENYEKEGIELLRGTLPKLYDGFTQELKIRSKVNYFDFNFSDEDKNALVKLGYSQEEVESLKPVFISRMKNVKTTGAIHKDTMMSTREFDETKCLIKTVTLDNLKIENKVEEEPLKDDKYPEKRIANYYNPKTDRLLYLKLKEMLVEKGKILDKVYKPTKSGQQGPLVRTVKLYEKSSNPVITKHGAGANDKMYRVDVYEKANKFYLCPVYMSDVYNKTLPNKVIIRDKPWAEIDDSYQFKFSLYQNDLIKVTSNKEIVMKKDKNHQNKLSLKPDEIKNNEFFVYYNSTNISTASIEVISYDNCYYKEGLGVTTLKNIEKYYVDIMGKIYKSPKEERKNFNGLY

SEQ ID NO: 1973 - protein, 1318 aa, Artificial Sequence
  OMNI-339 amino acid sequence
MKQNGNHAAIGDYYIGLDVGTTSVGWAVTDKQYNISKFKGNAMWGARLFDEAQPAAARRSSRTARRRLARRKQRLLLLEMLFAEELNKVDESFLMRMSESALWPEDKSDTCPFSLFGGRDYTDKDYHRQYPTVYHLRNELVHSAELHDIRLVYLALHHIMKSRGHFLYADSNDGEAISVEAALSEFSEFVFAEYGISFEPAHREDFIAQLISGVGVTAKKKLLKAAADIKADDEAEISTTALLDLLAGATVKLSELYRDEELKSAEIKSVCLKNDLDEVFDELSELLGDRVELIPQAKRLFDTARLSSMLNGHKYISEAKVELYEQNKADLKLLKSYVRKAAPEQYKHIFSEKSDKLANYAAYTDGECKQEDFCKFLKSVLPEPDDGDPEVQRIYARIKDGTLLTRLKGSDNGVIPYQLHKNELTEILKNAERYLPFLKETDEAGLSVSDKIIKTFEFRLPYYVGPLNPVSPNGWAVRFPEHTGEKVYPWNFEKVIDTEASAAGFIENLIGRCTYTGEKVLPKDSLLYSEYALLNEMNLLRIDGKPLPIEDYRRLLDELFYKSKKKVTKKRIRSYLLAEGLIEEAAVISGVDDNIKSSLKSYHDFKSILERTGDADMVEDIIRSILIFGDDKKMLRRWLSRSTHDLTDDDIKYICRLKYSDWGRLSKVFLTGIYSPDEWGEAKSIMDWLRLGERNLMQLMSNDFEFAAHAAEHAAELFGTDRTLGDKLDDLYIAPSVRRSIRQTLRIVDEIVDIKKSVPEKIFIEVARENADEMNRKRTESRKDQLITLYKSCKEDSGELFERLENEDENSLRSDKLFLYYTQLGRCMYSGEPIDFGALSRGEMYDIDHIFPQSKVKDNSIDNRVLVKNGYNREKTNIYPINESIRTKMRPMWDHMKKYKLISQKKYDRLIRSFPLTDAELEAFVARQLVETRQSTKALAGLLKDILGEKVRIVYSKAGNVSDFRHDSDFIKCREVNDLHHAKDAYLNIVVGNVYDTRFTKRFFANIRNENYSLNKVFAFDTKDAWDTKTSMATVKKYMAKNNVIVTRMPREVKGQLFDLQLMPAGKGQLEKKSGLPIDKYGGYNKLSGAYFCLVEHTEKKKRIRTLEPVYVYKKQQFEADPEEYCRQTLGLTEPKVIVNRILIDSLLELNGQRLYVNGRTGERLIFKHSYQLTLGYEWEKYIKQLQKYSERCYARRTELPLTDHDGITRDKNEELYGLFIEKCRQKVYAELFGNMRADMEKHHEKFSAMSELGQVNLLLEVLKAFRCNAQKADFTNLCGKGSVGILVKSKAVSKLDSAYLVNRSVTGLYETKVDLLK

SEQ ID NO: 1974 - protein, 1347 aa, Artificial Sequence
  OMNI-354 amino acid sequence
MKSYMQTAPYYIALDVGTNSVGWAATDKEYNLLRFKGNSMWGVRLFDEGQTAEERRISRTTRRRLNRRKQRLNTLYLLFKEELDKIDPDFDKRMKESYLINADKTTGTRFSLFADPDYTDKDFAREYKTMYHLRQELVKSEKPHDVRCVYLGVHHILKSRGHFLFEVGENAEENRSFAEVFDEYLIAIRDNLGVDCSVSDVSEVHNIVSDKTMKQAEKIKGIVSLISVALDELTEEKELKKQIEAFAKLIVGANVDLKNMFGDDTLKGSFKVTADVEGDDKFKDLSDKQLSVIAAAKSVYDQIKLEEIMGSSNYISDYMVSKYEEHRKDIKALKEFLKSKGRIDLYKRIFSERTKGLNNYAAYVGYEGQESNCTAENLKDFLKKELQEYKSEIPAIYDKITEGKFAPKLRTTDNGAIPSSLHKKELVKILENASAYLPFLNSKDADGLSVKDKIISLFDFKIPYYVGPLNNSSDKYWIVRSNEKITPWNFDRVVNCEETAKEFILRMTGKCTYTGDDALPLDSLLYREYTVLNEINVIKINGKPISKRIKDIIYNDLFVKSSKKVTKKAIHTHLVNLGEITKDDEITGVADTLTTSLQSYHKLRRTIEKGYSSELIEELIKSIVLFAQDKKLLKKWIKEKMPDASDEDIKYLSSLKFSGWGSLSKTLLCDIMGNLNTETGEVMSVIDVMRENSENLNQVLYNYGFEKAAKEYRENKYGSQDKISDILDSMYISPKVRRSIRQAMKIVDEIIGIKKAAPEKIFIEMARDVDGTNKKEQTKSRKEQLIELYKACEEDSAKLLEVCGEEGIERFKELYNNLENIEDSKLRQDKLYLYYTQFGRCMYSDEFIPLDELQDKNKWDIDHIFPRSRIKDDSLSNRVLVKAQLNRSKTNEYPINQDIRDKMRDKWLVLKNKKMINDTKYSRLVRSEPLTTDELSAFINRQIVETQQSTKALATILGKRCPDSKIVYSKAGNVSDFRKYYAYRSEEPYTEFIKCRDLNDLHHAKDAYLNIVVGNLYDTKFTAEFFKNIHNEEYSLNTEAMLSWPVKGAWIPESKDKTQGTILTVRKTMGKNNILYTRMPREEHGKLFNLTILKKEKDSNSGMPVKKDRSIENYGKYDKIKGAYFALVEHTEKKKRVRSLEPIFICDKTEYEKDNTAFFESKGFKDPRVIVPKIHMDSVLELNGVRYNIKGRSDDNIIYGHMCQLVLDSRAVTVIRNTTKYLQRMSKQKDKKEPTRYDGITAEDNIYLMGCLIDKIDKVKDYNKSIKCSRIILEAEKKNFENGSYTLYEQCVSISKALIGFRCNQRVSGYNGSTIRINKKVSSLSSAYLVNQSPTGLYEYKIDLLKD

SEQ ID NO: 1975 - DNA, 3462 bp, Artificial Sequence
  OMNI-75 DNA sequence
atgacaaagtatagtgtcggtttggacatcggtatagcaagctgcggctggagcattattgatattgagaaaaaagagattatagatttaggcagtcggatttttccatctggaaatgctgctggaaatcaagacagacggagttttcgtgggacgcggcgactcatcagacggcgaaaaaatcgtttgtcagatttgacgaagtttttggctgaaaatggctttgctgtcagtaatgacaaaaatcaaaatccttatgcccttcgttccaaagggctggcagagcaactatcaaaggaagaattggcaactgcactttatcatattgtcaatcggcgtgggatttcctatgatttgggcgatttggaagacgacgggacgagcggtgttagtgactacaaatcttcgattaatatcaaccgccagcttttgcgtgaaaagacgattgggcaaattcagcttgaacggctgaatgaattcggtcaagttcgtggtcaggtcaaagcagatgatgaaacaactttgctcaatgtttttccgtcagctgcctatgcggacgaagccaagcagattttggaaaagcaggctgaatattatcctgaaatcacggacgaatttatcgcgaaaatcaatgaactgattactcgcaagcgcgaatattttgtcggtccaggcaatgaaaaatcacgtacagattacgggatttacaaaacggacggtaggacgctggataatctttttgacgaactcatcggaacggacaaaatcaacggcgaaaaacgggcatctgcgtcaagtttgaccgctcagatttataatttgctcaatgatttgaataacctgaccgtgccaaacaccgaagatggaaaattgacgactgaaacgaaaaaagaaattctgtcagctgcgaagcgggctgagggtatttttgggaaagttcagatttgtaagctaattggagtaaaatttgatgaacttaaaaccaaaaaaggtggagaaattgaatttaagcatacactttttgcttacagaaaattccgcaaagcgcttgcagaaagcaatattgaagcaaatgatttgtccaccgaatttttcgataaaatcgcagatattctcacgttaaatactgaaaaagctgaaatccgcaagcagttggataaagccgattttgccatttctgacgaggtaaaagaactcattgtcaaagaaaataaaaatctcctcgttgacggacgtgcgacttggcacagtttttcttacaaaaccttgaatttgctcattcctgagctgctcaatacctctgatgaacagatgacgattttgacaggtctgggcttgatgaagcctgacaatgagaaatatcaaggcttgaagaatattccagcagctcaaatcacagaagaaatttacaatcctgtcgtcgcaaaatcaacgcgcgaagccattaatgttttcaatgcgattgcaaaacgtgtcggcgcagaaaatattgcgcacgttgtcattgaattgccgcgcgaagacaatgaagacgatgttaaaaagcaaaaaataaagtttcagaaagcacaagaagccgagaaaaatgcagctgacgaactcgtcaaacaacaaatgacaattcctgacagcagcttacttgctcaatatcgcaagttcaaaggtctatcacaaaaagtgcgttattggtatcagcaagaaactttttgtccatactgcggcgagaaaatcaaggtgattcagctcatcaacaataatgaaagttttgaaattgaccacatcatcccgatttcagtcagttttgatgactcgcaaaataataaagtgcttgtccatagtcagtgcaatcaagcgaaggaaaagcaaacgccgcttggctggattaacaacggcggcggatttgggcaaacgaaagcggaatacattgccagagttaaggcaaataaaaatttcaacaaaaataaagttgacaatctgctcaacgacgcggatttgaacgacattatcacgcgtcgtagttttattcagcgaaatcttaatgacacgcgctatgcctcacgcgtggtgctggacgagttttacagctttttcaagtcaaaccatctgcccacaaaagtcaaggtcgtccgtggcaaatggacttcacaaatgcgtaaaaaatggaatagcgcaggtggacttgccaaaacgcgcgacacgcatcatcatcacgcgattgatgccagcattatcgccagttttccattgctgaaagcctttgacaaagcggtcaaattgattgatattgacaaggaaacgggcgaaattttgcaagataaagcagcggtcaaaaaagcgcgtgaagccgaattattggcgcaatgggcgattccgaatgaaaaagaatttgaaaaattagacagcgagatttttgattttccgcttttcaagcaagttgaattggcaaatgacattgatgacccagaaaatccagtcaaattcagccacaaagtcgataaaaaagccaatcgcgccgttgccaatcagacgatttacggcacgcgcatgaaagaaacagaagttgtaaaacgtggaaaaacggaaattgtgcaagatgaatatatctttggcacgataaaaaacatctataacgtagatgattttgcgaaattcaaaaagttgtacgatgaggcgctcaaaaaagaggatgtcaagtttttgatgcaagaaaaagacccaaaaacttgggaaaaattgcttaaaattctgaaaaacacgcctgattttgaagaaaaaacgcagacagatggaaaagtcaaagtcatccctgtttctccatttgagctttatcgccgtgaaaatggttttattactaaatatgccaagcataataatgggccaaaagtggtgagcttgaaatattacgactcaaaaatcggcagtcatattgatattacgcctgagaacgctagaaataaagtcgtgttgcaaagcttgaagccttggcggacggacgtttactacaatcctgacacgcagcaatatgaacttctcggtctcaaatatgcagatttgaaattcacaaaaggagtttacggaatcacggaggaagcctatgaaaagctgaaacatgggattgaagcggacggcacgattttgtggaaaccgattgggcggaacagcgagtttcggtttagtttgtatcgaaatgatcgtgtgaagattgtggacgataaaggggaagaaattgagttgttgtttgggtctcgtgctggaaacaatgagggttatgttgagatgaaacctatccacaaagcgagatttgaaggtgcagaggagattgctttttatggaaaaacatcttctggtagatttctaaagccattagctaaaaagggctataaactctacaaagtcaacacgggaattctaggcacaccctactacaccgaaaaagaatcagatcaaccaaaattaaattta

SEQ ID NO: 1976 - DNA, 3186 bp, Artificial Sequence
  OMNI-79 DNA sequence
atggagaagcgcctgggactggatatcgggacaaactcgatcggttggtgcctgtatgaaggcgacagcattctcgatatcggcgtgagaatcttctcggacggacgagacccgaaatccggggcaagtcttgccgttgatcgccggaatgcgcgtgccatgcgtcggcgccgcgatcgttatcttggtcgtcgatccgctctcatcaaggcgctcaaagcccatggccttttccccgcagaacaggatgcggcaaaggcgctcgaacgcgaggatccatacagcttgagggttcgtgcgctcgatcatcggctggatccgcatcagatcggcagggcgatctttcacctgaaccagcgtcgtggtttccgctctaaccgcaaggccgacagggtattgggcgatcaggaaagcggactgatttccaccgccactcgtgttctggatgaggcgatggccaaaagcggcgcgcgcaccctcggcgagtttctcgcttcacgcgacacccgcagagtgcgcatgcggcctgacgtcaagggctatgatttctatcctaatcggcaacactatctcgaagagttcgagaagatctgggacgcgcaatcgcaataccaccccgatctgctgagccaacaggcgaaatccgccatccaccgaatcatctttcaccagcgcccgcttaagccgcaggctgtcggcacatgcactttcgccgggttacacggcatccctggcgatgaaacgcgcttgcccaaagcccatcccctgttccagcagcgcaggctttacgaggaagtcaaccagcttgagatcgtttgtgcaagcgcccctgcccgcaagctgacgcgcgacgaacgcgatgccctcatcctcaagctgcaggacaaaaagaaggtcactttctccaccctcgcgcgcaccataagattgaaggagggtgaacgcttcaacaaggaaagcgagaaccggaaggatctggcaggcgacgaagtgcgtgccgagatgagtgacaagacgcgctttggcaggcgatggtttcacctttcccttgatgagcagtggtctgttatcgaccgcttgctgaacgaggaaagcaccgaagacctgctggcctggctcgaaaaggaatggtcgctgcccagcgatgtcgccgaggcagtagccaatgcgcatctgccagacggccatggcaggtttggccttactgccaccgttcgcctgttggaacacctcaaggctgacgtggtgacttatgccgaagcagcaagacgtgcaggcttccaccacagcgactttcgcgatggcgcgtgctacgatgagcttccctactacggggagatactttcccgcgagatcgcgccaggcaaggacgaatacggcgatccgctggaacggcaatggggcaagattaccaatcccaccgttcacatcggactgaaccagttgcgacggctgatcaacgcgcttgtcagacggcacggtcgtcccgatttcattttcgtcgaactggcgcgtgagctgaagctgaacgaaaagcagaaggccgaccacaagcgccggatcaagcagacaaccgatgccgcccgcgccagggcagaaaagctgcgcgagatcggccagcgcgacagtggcagcaaccggatgctcctgcgcatatgggaagaactgaatccctccaatccacttgaccggcggtgcccctattgcgccgaacccatttcgatcgagatgctgatgagcggatcagccgatatcgatcacattgttccctattcgcgttgccttgatgacagcgccgcgaacaaggttgtcgcgcataaccactgcaatcggcagaaaggaaaccgcaccccatgggaacaatgggggcaaacgacgcgctggcccttgatccaggagcaggtcgctcgcatgcatcggtccaagcaatggcgctttggccccgatgcgatggaacgggtggaccgggatggtggcttcatcgctcgccagcttaccgacacccagtatctttcgcgcattgcggcgcagtatctttccgctctctatacacccgatgagggacggcgggtctatgccgtgactggccggttgacggcgatgctccgccgactgtggggactgaatgacatcctgcccgatcacaactgggttctgaacccgcacagcaacgcacccaagaaccggcttgatcaccgccaccatgccattgatgctgcggtggttggtgccacaactccggcaatgatccagcaggttgctagagcggcagcacgcgcggaagagcaggatcttgaccggctctttgccgatctgccaccgccatggccaggcttccgcgaggaactgcagggccgcatcatggccgctgttgtcagtcacaagccggatcatgggcgcaaggggcgtccccttccagggcgagacagcacctcaggccgcctgcacaacgatacggcctatggcttcaccggaaggcgcaatgccaagggcatgccgatcgtggtcacgcgaaagccgctgctggccctcaagcccgaagacctgaccgatccggaaagaatacccgacccggcactgcagggcgcgttgtttgaagccacgcggggcgcaaccggcaaggactttgaaaaggcgctgcgcgacttttcgcgaagggacggcccttatcagggcatccggcgcatacggttgaccgaagcgctcaacgtgattccgatccgtgatcgaacaggacacgcctataagggtgtaaagggcgatgccaatgcgcgtttcgatgtctggcggcttcctgatggcaaatggatcacgcggtggaaggaccgggacggcatcgaacattccggcatagtatcgctgttcgatgcacatcagccgagccaagtctatcaccgcccccaccctgccgcgaagaaggtgcttagcctgcggcagaatgatctcgttgcggttgaacacgatggcgacccaggcaagatcatgcgtgtggtcaagttttctgccaatggctcgatcaccttcgccccacataacgaagccgggccgctaaagacgcgtgataccgaccctgccgatccgttccgttatgtcaccactgttgcgagcggactgaagaagatgcgcgcgcggcaggtgcggatcgacgaactaggaaaagtccacgatccggggccgcgcgaagac

SEQ ID NO: 1977 - DNA, 3276 bp, Artificial Sequence
  OMNI-91 DNA sequence
atgagttatgcaattggattagactgtggcatcgcttccgtgggctatgcggtaatggatttagatgaaaaaggaaatccaaaacgcatcatacgtctcggctcgcgtatcttcccttccgcggaacatccaaaagatggtagttctcttgctttgccacgaagggaagcaagaagtactcgtcgaaggcttcgtcgacataaacatcgtttggaaagaatccgatatatgattgttgatgaaggaatcctttctcaagaacaacttgacgttctctattctgagccggtctcagatatttacatgcttcgagttgacgcactcgacagacctcttacaaatgaggagtttgccagggtgttgatccaccttgcccagcggagaggctttaagtcaaatcgaaaggtcgacaaggaggataaagatgatggaaagctcttaacggcagtaagcggaaatactctccttatgaaagaaaagggttatcgtacagttggagagatgtttgcaaaagacgaaaaattctcatcacaaaagcgaaacaaggcggagaactacactaacacagtttccagagaaatggttgaagatgaggttcacaaactatttgcagcccaaagagagtttgattgtccctttgcaaatgaaacagttgagaaccggtatgtcaatattctgttttcgcaacgttcttttgaagaagggcctggaggggacagtccttatggtggcaaccaaattgaaaagatgattggtcgttgcacgttcttcccagaagaacaacgtgccgcgaaagcaacttattcgttccaatatttcagccttctgcaagccgtgaaccacattcgtattgtttcggatggttctataagaacccttcgttcagatgaaagaaaaaacgtacttgaggcagcgtttcaaacggatggtctgacgttcaaaagaattcgtgcggttttggggctttcggagaatgaccgttttcggaatgtctattatcggtctgatgacaaagaagaatgggaatctaaaaccaaattccagtatttgcacgcatatcatgagatgcgaaaaaggtttgacaaactgaagaaagggcatatcagcatcgttagccgtacagatctggatgaaattggatatgccttaactgtgtttaagacagacgacaaaattatctcatatcttaaagagcatacatctctcgataagtcagagatagatgctgttctgatgatgccttctttttccaaatttggccatatttctgtaaaagcatgcaaagcgattattcctagtttggagcaggggatgacctacgataaagcttgtgaaaatgcaggtatcaaattccaaggacatgatagtgacggaaagacaagatatcttccggccaacccaaatgatgctcctgaactagaagatatcaacaaccctgtagtacgaagagcggtatcacaaacaatcaaggtgatcaatgccatcattcgagaacagggtgaaagtcccgcatatctgaacttggaactggctagagaaatgtcgaagagttttcaggatcggcaagagatcaaaaagagtcatgaccaaaacaatgcaagaaacgaaaaaatcaaacaggaaatcgcagataattttggaaaggtcaatccttctggacaagatatcttaaaactgaaactgtatcacgaacaacaaggggtctccctatattcacaaaaggtgatagcgtatgatcgtctttttgagccagggtatgtcgatatcgatcatatcgtgccttatagcatttgctttgacgattctttccgaaacaaggtgttggttttttcaaatgagaacagagaaaaaggaaatcgtgttccgttagattatcttcgtggagaagaagcgaataattttgttgtgtacgttaaagccaatgtgaaagattataaaaagaaacagcggttattgaggtcgcgcccgacagaggaagatatcaaagaattcaaggaaaggaatttgaacgacaccaaatatttgagccgttttcttttaaactatatccaagatcatcttcagttttcagaaagtggttcagataaaaccaagcgagtcacatccgttaacggttctgtaactgcatatatgcgaaagcgctggggtatcaataagattcgtgaaaatggcgatttgcaccatgctgtagatgctgctgttattgcttgtgtaaccgatggaatgatcaatcgcatttccagatggagcaaataccatgaaacagaatatgaagaattcgagggtgagagttatgctgttgacccaagaactggtgaagtgttagatcgattcccgctcccatatccggagtttcggaaagagctggattgccgcttgtttgacaatgagaaacatatgcatgaagctctcactcggctgagtaattatcgtgacgttgaattgtcgacgattcatccttgttttgtttccagaatgccgaatcacaaagtgaccggaccggcgcatcaagatacagttcgtagtcctcgccattatgaggaggatgggattgttattgctaaaacagcgttacaaaacttaaaactgaaggatggcgaaatcgaaggatactacaagccagaaagtgaccgtttgctttatgatgctctgaaagcacgtttagtagagtttggtggagacgcaaaaaaagcgtttaaggacgacttctataaacccaagtcagacggaacacgtggcccattggttcgcaaagtgaaaacgttcaaaaaatcttcgttgaatgtctctgttaacaacggaaaaggcgttgcagacaatgggtcaatggtgcgcatcgatgtgttttttgtggaaggcgatgggtactattttattccaatatatgttgctgacacactaaaagaagagttgactaataaagcggttgtagcacacaaatcatacgatgaatggcgggaaatgaaagaagaagactttcaattctctttatatcccaatgatttgattcttgtaaaaaaagcttccggtgctattcctctaacaataaacttgaaagacagtacacttcctccaaaaatcgaaaagagcgaggtcttcctatactatcgcaaatcaggcatagctggagcaacaattgtttgtgataaccatgacggctcatactatgtgaccaatttaggaatcaaaacattagcgtcaattgagaagtaccaggttgatgttttggggaattattataaggttggaaaagagagaagacagagttttcggtaa

SEQ ID NO: 1978 - DNA, 3153 bp, Artificial Sequence
  OMNI-93 DNA sequence
atgaaaagaaagtgcggaattggtttagatattggaattggttctattggttatgttgttatttcaaggactaataattttgacgcccgtatagaagatttgggagtaagagtatttgattcaggagaaaatatcagaaagaaagcaagcaatgcgcaagagagacgcggatatagaagcgtacgccgtttgcttaggagaagaaagcatcgtaaagaacgtgtaaaaaaattctttttgaaaataaagcttatgaatgaaattcaattaaaagcatgggaagaaagaaatggtgatcaaaatgtacttcaaacaagaattaagggcttaagtgaaaaacttaagcctgaagaaattttggactgcattatacatatttgtaatcaccgtggttatcgtgaattttatgatgaagattcctgcaatgaaaatataaataaagatgatctgaaaaaaatagaaggaggattagcaagttttgatgagttatatcagcatggaaattataaatctgttgctgagatgattttaaaagatcccgtttttaaaacagaaacaacttttgtagattatagaaatcataaaaataataaccgttatgttttaattaaaagagaatttgtaaaaaaagaattggaaaatattttacaccaacaaagtaaatattatccgcagcttacagaaaataatattaaaattatttgcgataatatggtttttattcaaagagattttgaaactggcccaggtaatgaaaatgataaaaccagaagatttatgggttttattgatagtattggtaagtgcatgtattacaaagatgagaaaagagcttatagaagtactgttattgccgatatttatgctttggtaaattgtttgtcgcagttttcttttataaatactgaaacaggagaaattttactgcctgataatgcagcaacaaagattattgatacagcactgttaaatgcagcaataacagaaaatgatattaaaaatattttaaaaccgtatcatttggaaatgcgtaaaccggaaaaattacaggttaaagtaccagatactgttagaactttaaaaattttaaaatcagttttaacaaatgctggatataagtatgaagaattaataaaagaaaaacaatttgatgttaataatccttcaaaattacatcaattgtgtttattattgtctgaaaatattactccagcaagaagaacaagagtattaaaagctaagggatggaacgaaaaattacaaaaagaagttatacgtaaaaaatttggcggaacagcaagtgtatgtgaaaaatatatgattgatgccatagaggcatttaaacgaggagaaacttatggtaattttcaggcacgtatgctgaaagaacgagaggaaactttgtcagagtctaaaaaacaaaaatttctttcaccgtttgataaaaaaattgatgaagaattaattaaaaatactgttgtttttaaatctgtcaacgaaactcgcaaaattttaaatgaacttataagaagatatggttctcctgaatatattaatattgaagttgctgatgatttaggacgcagctttaaagaacgttctaaaattataaaacgtaataatgataaacaaaaagacagagaaaaaattaaaaataaattaattgaattaggattacgtaaagagggcgaagtaaaaccttttgatattgaaagataccgtttgtgggaagaacaagaaggcagagatttatatacaggcgaagcaattcctttagaaaaaatattaagtggtatttatgatgtagaccatattgtacctttttctcttattttagatgatagtttacagaataaggcattagttaatcttggtgtaaacaggcaacaaaaaggacagcaggttcctttagcttttttaaatgttgtagataaaatagattatttaaagcgcgttaatgttttgtataaaaataagaaaataagtactaaaaaatacaaatacttaatgttgcctaatttgtatgctaatagtgaattgcttactgaatggaaatcaagaaatattaatgatacaagatatataacaagatttttggttaattatttatcggcaaatttattatttgatagcacaaaaacaaaaaatgtttttggcgttaaaggaataataacatcaaaaatgagaaagttatggcttaataaaaagacatggggtgatgagcagaaaaacagagataataatttacatcatgccgcagatgctttggtaattgccaatttaactcctgcatatcttgaaattgccagcgataaaattaaacttgatagaatttacaaagactatcataagaagataagcaatgaatatttaacttatttaagtaaatctgtaaataaaatggttaaatattatggttttaataaagaatatgctgaaaaacttttaggaacgccgaatagccgtatacctgctatgataagaaatatagcagatgaagctgatatacgtctgtgggataacagcatagagtattataaagatgtaagtgaagaacagttttataaaaatgtaaaggcgttttataatgatgatactgcttttgcaaaaagtgtaaaacctgtacttgtttcatataagcaaaacagaaaatatcaaggtaaatttaccaaagataatccactgaagaaaaatgaaataaaaggagcttttattgaaaaaattgatagtttaggtaatgtaaatattttagatgctaaagagtattattgcgctgaattatataaaaacttgcaaggtcaaactattttacgtggaatacgatatgttgatttgcaaaagaaaaataaaaaattatatattatatcttcatatccagaagattataaaaaacatattatgtatttatttgctaatgactatattaaagttttcgataatgacggaaaaattaaatttaatggttattacaaaagtataaaaaatgtaaacagaaacgcaatttattacaaaaataataattctaatatacttgaagaaaaaacaatttctaaaaaagatgttgttaaaaaatattctgttgatatacttggtaaaattggtggtgaaattaaatgttccgtaccgtttttgtcactggaggagaatatttaa

SEQ ID NO: 1979 - DNA, 4047 bp, Artificial Sequence
  OMNI-103 DNA sequence
atgagcataaaaagtgattattttttaggacttgatattggtacggattctattggatgggcggtaaccgacccagaatatcacatattgagacgaaaaggtaaagcattatggggaataagattatttgatgcggccaatacagcggcagaacggcgaacatttaggacaagccgaagaaggattcagagaagacgacagagaattcggttattgcaagaattatttgcagaagaaatggtaaaattagacccaggattttttcagaggttgtcagacagcgcattttggcaggaggataagcaagagcagcaaatttattcactttttacttgtgaaaattatacagatgttgattattacagagaatatcctactatttatcatttgagaagtgcattgattcaggaaaagaaggaatttgatcttcgtcttctatatcttgctcttcaccatttgatgaagcacaggggacatttcctgtttaatgggagtattaataatgtgacgtcatttcatacgacgtttcagacgtttgcagattgtctttatgatgagtttgatatagaactggaatgtgattccgaagatagatttgcagaaattttaaaggataaacatgccagaaaaacaggaaaatgttctgaattagagataatctgtcatatagaaaaatcaaataagcagctaaaagaactttttaaattaattacaggaatgaaagctagtttgagtgttgtgtttggtgatgatgagttagcggaaatagaacataataagattagtttttcagagagtagttatgatgaagtacgtcttgcattggaggatgagattcaggagaggactggtatactggatatctttcatgcagtttatagttgggcgattctcgcggatattttagaaggcggagaatatgaggggaattcttatctaagcgttgcgaaggtaagcacttataaaaagcatggtgatgatttgcggttgctaagaacactggttcgggaatattgtcctgatcattacaaatctttcttttccgtatcagggaaggagaattattgtgcatatgcgggtactttaaaaaagaatggaaaaaaacagccgattaaacgttgcagccaggaagatttttataaagcgttaaagaaattgctgaatcagatgccgacagaacaaccagaagtgaaagacatcttcatcgaaattgaaaatggtacttttttgccgttgcaggtaagtaaggataatggagtgataccttatcaggtaaataagatggaattagaaaaaatcctgcagaatgcagaggaatatttgccatttctaaaaaatatagatgaagaatgtggaaaaacggttagtaagaagattatagatctctttgagtttagaataccatattatgtagggccgcttaataccgctaaaggagaaaactgttggatggtcagaaaagaagcggggagaatatatccgtggaattttgatgaaaaggtagacagagatcaatcagcagaaaaatttatccgtagaatgacgaatcagtgtacatatttaatacatgaggatgttgtacctaaaaattctttgctttattcggagtttatggtgcttaatgaattaaataatgtaaagatccggtctgagaagctgccggtggagttaaaacaggcaatagtattggatttgtttaagaaacaaaagcagataacaggaaaaaaacttcttaattacttgaatgcaaatggatatgatgtaaaaaaagaagatttgtcagggtttgacggaaactttaaatcatctctgtcatcatatcttactttgaaaaaagtatttggtgaagaattagataaatatagtgtgcagcagatggcagaggatattatcttgtggatcactctgtatggagatgatcagaagatgttgcgcagggtaattcgaaaacattatgaacagcaattgagtgaagaacagattctttccttatcgaaattgaaattccaaggctggggaagattatccagacgacttttgagtgaaatggaaggcgttgattgtgagactggtgagtgtatgacggtcatgcaaggacttcgtaatactcagaataatctgatgcagcttctaagtcagcagttttcatttatggaattgattgaggaagaaaatgggaattattatgtagatgagattacatacgataatcttgtgaaagatatggttatatctccgtcagtgaagagagcagtctggcagacagttcagattgtggaggagattaagggggtaatgggctgtcagcctaagaagatatttgtcgagatggcgcgaagcgatgaagagaaaaagcgtactgtatctaggaaagacaggttattagaagcatatgatgcgatcaaggatgaggctcgtcaatggcaggaagagttgcaaaagtattcagatggtgattttaaggctattaaactttatctgtattatacgcagatggggcaatgtatgtatactggaagaaagatagatctgtcacaattaaatgatgcgacggtatgggacagagatcatatatatccacagtccaaaacaaaagatgatagtctggataatctggtattggtagaccggagcgtgaacgctaagaaaagtgatgggatgctatcacctgagattcagcagagaatgcgggctacttggaaatacttaaaagagaaaaagttgatttcagagaagaaatatgagcgtttgactagggtctcaccacttacagatgaggaattggcaggttttattaatcgacagttagttgaaacacgtcagtcttcgaaagcagtagcaacacttttgaaacgagtatatgatgaagcggagattgtctatgtaaaagcggaagctgtttcaaattttagaagagataatttggattatattaaggtgcgtgatctgaatgattatcatcatgctaaagatgcatatcagaatattgtagtggggaatgtttttcatgagaaatttaccagcaatccgcttcgttggctgaaaaacaatcctaatacgaaatatagtttaaatcagatgtttaactttgatttagagaaaaatggggtggtaatatggaaaagggggaaggctggaagtattaaatgtgttgaagaaacattgaaaagaaatgatattctttttacacgatatgctttttgtaataaaggtggtttttttaaccagatgttaacggcagctccagaagataaaacgaaagcaaagggacttgtaccaataaaaaaaggtatggaaacatggaaatacgggggatatacatcagtaactccgtcacattttatgttggttgcttcgaaagataagaaaggaaaggagataagaacgattgagacagttccgttgtataggtggaaagagttcaaagaaaatccagatgcattactccaatattgtagagagttctatggtttgaaagagcccaaggtgttgataccatgcatcaagaagaatgccagattagtcgttaatggatttccaatgcatttgaaagggagtacaggaaaacaattgattttgcagggagcggttcaattatgtctgaataatgaaaatataaagtatttgaaaaaagtcacaaaatatttggaatataatgcacagagaagagataaaagaacactgctggaagtaagagaggttacaggaattaacaaagaggaaaatatacagttatatgatgtgtttgttgataaattgagtaacacaatatatcagtatcgtccggccaatccaaaggacaatcttataaaaggaagagagaagtttatagaattagggttggcagaacaatgtgttgtgttaggtgaagtattgcatttgttccaatgtaaaccactcacgtctgatttgactttgattggaggttcaccgaatacagggacaataaaaataacaaagacaattagtaattgtaatgttgtaaagttgttaagccaatctattgcaggtgttaaagtgagagaaattaatttgttaataatatga

SEQ ID NO: 1980 - DNA, 3327 bp, Artificial Sequence
  OMNI-104 DNA sequence
atgaaatataaattgggtttggatttgggcagcacttctttggggtgggccgcggtaaaattaaatgatgcaggtgcggtggaacaactgttggatttcggggtacgtattttccccgacggccgtgatgccaaaacacatgcgccaattaatgtggtgcggcgtgcggcgcgtaccatgcggcgtcgtggtgaccgtgtaaaactgcggaaaaagcgtgtgttgcagttaattcgaaaatacggtttggattttgatattcgttccaaccccattttggaaaatccgtatgaattgcgtgtccgggcactggaacatcgtttaagtccgtctgaactggggcgtgtgttgtttcatctggccctgcgccgtgggttcaaaagtaatcgcaaagaaaccaagggtgaaaacggcggtaagttaaaggcggccacagatgccttggcatcggcggtcggggacggtacgttggcccagttccaggttcagaccaaaaagttccgcttttccaatcagtttgacggaaatgttatcaaagacggggcactgtatcccacacgggatatgtatttggatgaattccatcgtatttgtgatgcccagggattggataaggaaatgcgggccgcatttgaaaacgctattttctttcagcggcccctgattcccccggtggttggtacatgtatttttgccgccgggcagccgcgtgcgcacaaatttgaacccgtgttccagcggtggcgtgcgttgcaacagttaaaccagttggcgattttggataatggacaaaacgtagccttgacggatcaacagcggcaatgtctggtggatattttgctgtataattttaacggggtaaagcgcgacaggggcggccgtgtaaaaattacgttcgcggaaataaaaaagcagctggggctgtcccgtacagtgaagtttaacctggaatcagaacagcgcaaggaattgaatgttgattcaactggtttcagttttgccgaaattggcgaactggatttttggcgttctttgaccgatgaacaacaatccgatgtattgaataaaatcaatgacgaccagacagaagatgccgaattgattgaatatttggtggcacattacggattgtctgcatcacgcgcgcgggcaataattgatatccccctggaagatgatgttgccaatgtgtccgtggtggcgatgaaaaaaatgctgccgtttttagaaggggggcaattatatcatctggcggtacattcggcggggtatcattatggcgaacaagatgtgccattaatggataaattaccgtactatggtgatttagatgtgttaaagccgtcattaatgcccgcgcgtgacggtgcataccggaccatgaatgcaacggttcacattgccatgaatcaaattcgggtggttgtaaacgatttgattgaacgttatggtcggccatgcgccattaacatagaattgggccgtgatgtgcgtgcgggtgccaaagaacgcgccgaattggacaaacagcaatctgccaacaaacgcaagaatgacgctattcgggcggaactggccgaaatcggcatattaaacccatcccgcgaagattttcaaaaatataagttatgggaaaatttggcgccccagccccagaaccgccggtgtgtctataccggcgaaccgattaccagtctggccgcgctgttcaaaagtgggcggtttgaaattgaacatatcttgccatttgcccagacattggatgattctttggcaaacaagaccatatctgccgttgccgctaaccggttcaaagggaaccgcagcccggccgaagcatttgacgatccggcatccccatgggcgtatgcagatgtttgggcgcgtgcccaaaatctgcccgatggcagtcgttggcgctttgaccgggatgccatggaaaaattcacacggcacggtgattgtattgcacgcgcattaaatgatacccgttttatgtctgtgatggcggttaactatttaaaacatatctgttcggataaaaacaaagtccgtggattgccggggcgtttgactgcgatttttcgtgatatgtggcacttggattggtggaaaaaccacgatgatgcggacacatatcgcgccagtcatatccatcatgccattgatgcgtttgtgattgcgtgtatgggggcggggaatttacaaaaactggccgaaaatgccacgcatctggaagattttcatggaaaaacactgaaagaaaaacatcgtcaattgtttgcggacatgtatctgccgttcccggaatttgattactatgattttcggatgcggtgcgaagcatgtgttatatcctatcgcccatctgtaaaagaaccggccgcatcggatactgttggatgtctgcacgaagatacggcgtataagttggaaaaattcgaaaccggaacgcgggcaacgatgtcacgccggattgccttgccaaccacggcggatgcgcgtgccaaatttaagaaggattttgattcgctgaaccccaaaacattggaaatgtttttggccgaaaccggggtggcaaacgatgcaaatgacatcgcagaccagttcttgaattggtgccagatgcgcggaattaaaaaagtgcgtatgtttaagacccgggtggatacgacgacttatgttccggtgtttcgcaatcgcggggataaaaatgcgtttaaccgtgcgtggaccgaatggtatgcggccgcgggtatcgcgcgggggatgacagaaccaaaggctaaaaaagcccagcaggaaaaggaaaggcgtttattggcgctgtatcaaaatgccgccgcccgtgcatacaagtggtttgtcagtggaaataatttttgtgcggatatattcgaaattcgttctgatgaccgacgctatcccgcattggccggccagtggcaatctgaaattatatccaattactgtgccacattgaataatggcacgcccatgtggcgttgcaaatatgcaacggcccggcgggtgatgcggctcagaatcaatgatatggtcatggcggaattttcgcgggataatgtgcctttgctcaaagggttggaagacgcggtgcgtcatcaattggccgtgcaagacacagatacagtaaatattattttcagggtaaagaaaatcagcagcaatggtgcaatatttttgcgaccgcattatattgccaaagaagatgctgatacaaaaacatggaaagccaatgcgacatctttgcaaaagtacaaggcccgaaaaatacgcgtcagcccaacaggaaaagttctagaataa

SEQ ID NO: 1981 - DNA, 4152 bp, Artificial Sequence
  OMNI-120 DNA sequence
atggaaaaacagaactactacataggattggatatgggaacatcctctgtgggttgggcagttacagatgatagttatcatattatcagacgaaaaggcaaagatatgtgggggattcgtgagtttgaagaggctaaaacttctgctgaaagaaggtctcatagaataagcagaaggaggcttcagcgctctaaggtcaggatcggattgatcaagatgtattttgatgaagaaatacggaaggtcgatccatttttttatgaaagactggacaatagcaagtactatcaggaggacaaggatgaaatcgtaaagagtcccaacggggtgtttaacgataaggaatatacagataaagattattacaatcagtatcccacaatatttcatttgagaaaagaacttataaataacgaaaatgcaccatatgatgtaaggatagtgtatctggccgtattaaatctgtttaagaggcgaggccatttccttaattcgagtttaaggttggatgatgagagtgcagagtttagtcttaaagatgcatattcaaatttgctgacgataatggctgataatttaccagaggagttatcaatagcatttcctgagattgattccgataatacatatttggaattgcagaacatacttggtacaagggaattcggaagaaaacagaagggggagaaggttgccaagttacttggtatagatagaaaacagaaaaaagaaatggaaatagtcaatggaatggttggtctatccatagactgttgtaaactgtttgatatagaggctgatagtaagataactgcaaagttttctgattttgggtatgcagaaaaagaaccggaaatacttgatcagttaggtgataactatggttcaattcttatggctataaagacggtttatgatataggatcattaactgaaatattgaagggacagaaatatctgtcatttgcgagagtggaggattatgaacaacacaaggctgacttgagaaaactgaaaaaagtagtgaagaaatatgcactggaacgttatgattatttctttcggcagaaagaggatggtacatatagtgcttatgttaacagcgtaaattctgaaaaatataatgatttgggttcaaaggatacgaaaccaaacagaagaaatatgaaggctcgttcccgtgatgatttctacaaaggagtaaagaaacttcttaaaggaatgccggaagatgatgctgatgttattgaaattaataaaaagatagagaatgaaacatttatgcctaagcagcttactgccggaaatggtataatcccgaatcagcttcatgcaatggagttaaaaaaaatattggataatgcatcaggatatcttgatttcttaaatgatgtggatgaaagtggatttgcggtaaaagagaggattttgcggttatatacatttacatttccatactatgtaggaccgatttcatccggtagcaagaccggatgggcaatcagaaagcccgggtttgaaaagggggtgattctaccctgggagcttgatgaaaaaatagacagaacagaaactgcaaaacgctttatcgataggatggttaggcgatgtacctatctgaatgatgagatggtattgcccaagtcttctcttaaatatgaaagatattgcgttcttaatgagataaataatatcaggatagataacacaagaattgataacgatctgaagaagcgtctctttaatgaaatctatttgaatggaaagaagccgggaagaaagaaaattgaaagttttctgtatcgcaatggagtgcctagggatgcccaagttaccggtatcgataaggagctaaacaacgcattgagctcatatggaaaattcaaggagatattcggtgatgaattggaaaaggattccgtaaaaaaaatggtggatgatatcatattccattgtacggtatatggagactcaaaaaaatttatctatgactatattcagaaaaactatccagaatcagaatatccgctcttgaataaaaagactataaagagaattatcggtttcaaattcaaagattggggaagattttcggaagagatgcttgatcttcagggttgtaattatgaaacgggagaggtgtattctattctgacggcgttatgggagacaaataacaattttatggaattgataaatagtgattcctttgagtataagaaactgctggaagaaaaaagtgggtctgccataagctcgcttgctgaagttacccctgaacttttggacgaatactatttcagtgcaccggtaaaaaaaatgatacttcagactatgggggtaatcaaagaaatagtacagattatgaaatgtgagcctgatcggatatttatcgaaatgacaaggtcagatggagaaaagggagacaagggacgtaaagattcaaggaaaaaagctttgttagatttgtataagaatataattgatgagttgcatgataagaattattggaaagaccttattgaaaatgcagataaagacggaagacttagaagtaagaggatgtatttgtatataaaacagatgggaatggatatgtatacaggggaacctatagatcttgattatttgtttgatgaaaataggtacgatatagatcatatttatccgagacattttgttaaggacgacaatatagaaaacaacctagttcttgttaataaggcttctaatgcaaagaaaacggatatctatccgattccgggatttattaaagataatcccaaagtgtggaagctgtgggaaatgctacataaaagggggctgataaatgacgttaaatattcaagattaagaaatagcgaaccatttacagatgagcagaaggccgggttcatagcaagacagctggttgagacaagccagggaaccaaaggcgtttcagatatactgaaacaggtgcttccgcaaacgaaattggtttactcaaaagccggtaacgtgtccaggtttagaagtgataataaattctataaatcaagattgattaatgattatcaccatgcaaatgatgcttatcttaacattgttgtaggaaatgtatactacacaaagttcacaagcagtccaatgaactttatcaagaatgagtattcaaaggattctaagaagtttgagtacaatcttgataagatgtttgcttggaaagtagagcgggatggatatacggcatggattccgctaaaaaaaggaaatgagtatatagcaacaataaagacggttgaaaagatgctagcaaagaatacgccgttgcttacaagacagagtttcgtaaaatccggtgtaattaacaaagttactttatatgggaagaatactgcaacgcatgagacatatataccgctaaaaatgtccgatcctaagatgcaggatgttacaaaatacggaggatataccagcgttaatatttgttatttcttccttgttgagcatgagaaaaaagggaagaaagttcgcactatagaggccttaccgggatatttggagaaaaaggtggaaaatgatcctgccgaattggaaagatattgcgtggaaggattaggcttggagagtccttctgtaaggtatagaaagatcaggatacagtcattactaaaggtagatggatactatatgcatctgtcaggaaagtcagggaattcattgatagtaagaaatgcatgtgcgttgtcgatcggaaagaaatggcaagattacattcattatatagaaaagagtgaagaaaatggatttaaatacgatgatagtagaataacaaaagagaataatattgaattgtatgacatcatttctgaaaaacatattgatggagtttataaaaaacgaccatgtgggataggtgatgcagttaagaatggtaagaaaaaatttaaagaacttacaaaagaaaatcagtgtaaggtgattttacaaattctacaaatatcatcaataggaaattataaagctgatttatcattaataggaggggcgtctatgatgggaaatatgaggattagtaaggaaataacaaagaatgaaaaggttatgttaattcatcagtctgttacaggactatttgaagataaacttgttgatttaaaatcgatatga

SEQ ID NO: 1982 - DNA, 3294 bp, Artificial Sequence
  OMNI-124 DNA sequence
atgggaaagattataggactagatattgggattgcatcagttggttgggcagtgttagataaggatagttataagattgttgaggctgggtctaatatatttccggctgcggaagcaagtaagaatcaagaaagacgtgaatttcgtggcttgagaaggatgactagaagacgaagaacccgtttggatgattttaaaaagctatggaagaactattataaaaatgagtattcagtaacacctaataatgttacagagttaaaagtcaagggattatcagaacagctatcagaattagaattatacactgttttatattcgtatttaaagcatcgtggtatatcttatttagaggatgctgttgatgaagggaaaactggaagtgattatctaaaaggacttcaaacaaatcaaaaagagatgaatactaaattcccaagtcagatccaatatgaaagactagagaaatatgggtgttttcgtggagaaaacaaggtgagtgatgatgaggtattgagtaatgtttttaccacatcggcatacaaaaaagaaattgaagaactgattagtgttcaggataatcttgggaatgaattagataaagattttataaaaaagtattttgagatattttcgagaaaaagaaaatattatgaaggtcctggaaatgaattatcaagaacagattatggtatatatacaactaaaattgatgaaaatggcaattatatcactgataaaaacctttttgaaaaattgattggtaaatgttctgtttatcctgaagaaatgagagcatcggctgcatcatatactgctcaagagtttaatgcattgaatgacttaaataatcttatagttaatggcaggaaactaactaaagaggaaaagataagtattattgaatgttataaaactgaaaaaacaataaatgttagaaaaatcatcaaaaatgtgataggagagaatattgatcaattatccggatatagaatggataagaatgataaagaactttatcacacctttgaggtttataataaactgagaaaagcctttgaagaggcgggaatcagctttgatttttcacgtgaggattttgatgaaataggaagaattttaactttaaatattgaaagagaaggtatagaggatgctattagaatcagtaatctggttttatctagtgacgcagttgatgtactaatatctgtaagaaagaaaaatgcttctttattcagtaaatggcattctttttctttgaaaattatgaatgagctcattccggaaatgtatgaacaaccaaagaatcagatggaattattgtctgatatgaagtcaatcaagtccaaaatggatgagtttaaaggcttagaagatattcctgtcgagactattattgaggatatatacaaccctgtagtaaagagatccatcagaatcacaatcaagataataaatgcattaaagaaaaagtattctgatatagaaaaaatcgtaatcgaaatgccaagggataagaattccgatgaagaaaaggagcgaatcaaaaagtttcagaaggatcaagaaaatgaattgcccaatattataaaaagagtaaaagatgagtatgggataacactgacgccggagttgatagccagaaaaaaaggattggcttttaaacttaaattgtggaatgaacagaatggaagatgtccgtattccggacgaatgattgatatagaaagcttgattaatgatggtgatttgtttgaagtggatcatataataccactctctatttcttttgatgacagtagatcaaacaagacgcttgtgtacagagtggaaaatcaggaaaagaaaaacaatacaccatttatgtatttgagtagattaaatcgtcagtggaattatgataaatttgcggcttttattaaagaattgtatggtagttccgggaaagatagaaaaaaattcagaaagaaaatgaataattttttatttacggaagatataaataagattgacgtattaaaaggatttattaatagaaatataaatgacactcgctatgcttcaagagttgtacttaattcattgcaaggatactttagagctaatgataataacgtaaaggtgtcggttataaatggcagtttcactcatcagatgcgtgttaatctatcattagggaaagatagagatgaatcctttgctcatcatgctgtcgatgctatgttaattgctctgtcacaaatggggtatgatgcttttagagcgagacagaaggatatagtagattttgagactggtgaaataattaatggtagtgcctgggaaaatcaggatgaaatgtataagacagtcttatatcaggaaaaatggaagaatataaaggataatatcatagaggcagagcctaatattaagtattggcataaggtcgataaaaagtgtaacaggggactatgtaatcagactatatattcaaccagaaaatgtgatgataagatatggaaggttgataaactgaatattcgagataaggatgatgtaaaaaagctgatctacatgatacaaaatggaaaagaagataaaatacttatggctcaaaatgatccaaagacttttgctaatctgaagtatattttagatgaatatagcgattgtgagaatccgtttgtatcttatgaaaaagaaactggtgaccttgtaagaaagtattcaaagaagcataatggacctaaaataacatatttaaaatatatggttgaggaggttaatagctgtatagatatatcacataagtacgggcatgaaaaaggatcaaaaaaagtctttttggctcaattggttccatttagaacagatgtctattacaataataacagtggtaaatactatctcatagggataaagcagtcagatataaagtgcaagggtaatcagtacattattgatgaagaaaagtacacagataatttgattcaaaatggtcttttaaaggaaggacagaaaatagaagatttagagaaacttggctatttatttaaattttcaatctttaaaaatgatactattgaattcgagaagaagggagaattaatcaagtgtagatttttatctcaaaattcggcatctaagaatagaatagaggtaaaaccaatcggaaaaaaagattatgaaagtagaaatttgcccacgctttcgactacaacagttattaataaatatgtaaaggatatattgggaaatgaaaagcaagtaagtggcgaaaaatttgaaataattgttgattcaaaataa

SEQ ID NO: 1983 - DNA, 4110 bp, Artificial Sequence
  OMNI-125 DNA sequence
atgaaaaaagtattgggtctggatttagggtctgccagcattggatgggcagtagtaaacgtagctgagacaaaagaagaaaaagcagcaatccttggctgcggatctagggtcattccaatcagtgccgaagaaaaagatagttttgaaaaaggcaaagcaataagcactaatgccgaccgcactcttaagcgcggaatgagacgcaacttgaaaagatatgagcaaaggcgcgacgacctccgccgccttttcattgatcagggatggatcagcgatggtgagcccctctccgagagtggcaaaaatagtacatatgagaccctatacctacgttccaaggccgcacaggacgagatttctctaaaagacctagcccgtgtcctcctgtctattaacaaaaaacgaggctacaagagttcaaggaagactgattccggagaagacgggcaactaattgacgggatgagcatcgcaaaggagcttgccaaaaccggcaagactcccgctgaatttgcattggagtcaatcaagagcgggaaaagcggtaaatttgatttctatcgttctgaccttgagaaagagttcgacagaatctgggactgccaacagtccagctatccggagttgttgactgatgaattcaagagtcagttgtccaagatgaacaaaaccggggccaccaaagcattcttcgcaaaatacaaattaaccactgccgagaataagggtaaggaccgtctccgcaacagtcttgaatggcgagtttcggccttaaaggagcctcttgacaaagagaaaatggcttatgtcatatgcgagctaagaggagccatccaaagttcaagcggttatctgggcgacatcagcgaccgtagtaaggaactgtatttcaaccaggaaactgtcggtcagtatttatacagacgaatcaaggaagaaaaaggattcagcaccagaaaccaggtattttaccgccaggactacatcgatgaattcaacacaatctgggcgacccagtcagcattccacccggagttgaccgacaccctaaaacgcaagattgccgaccggatactattctatcagcgaccgctgaagtctcaaaaagggctgatctccttctgtcaattcgagagtcggccaatcaaagttattattgacggcaaagaaaagacacgtacgaccggaagcaaagtagccccgaaatcttcccctctgtttcaagagtttaaggtcctccagatcctaaacaacgtgaccatcaaagaccgccgcacctttgatagccgcggccttggcaaggaagagaaggaaagccttgccgccacactgagaatcagagagaagatgaaaggatccgacgccttgaaacaattgggcttggaccctcgtcggtatgacctgaattacaaggagttagagggaaattctactttattctccctattctccaaatacattgagattgtcaatctcgagaaaaacagtgagtatgagttgcagaagatggcctatgagaaagccttggaagtgattcgcgataccttcaataagcttggctgccattccgacatttttactttcaactcagaccttcccaaagaagaatacgagcagcagcctattttcaaactttggcatcttctctattcctatgaaggcgacaaatccgtcaccggaacagcttctctagtgcggcacattatggacataagcggccttcctgagccccaatccaagattattgccggagtttcattcaataataattatgcatctttaagccacaaggctataaagaagattttgccttatatgaaggaggggcatcagtattccgacgcctgcgcaatggccggatacaaccactccaactccctgaccaaagcagacatagagaataaagtccttgtagactccctggcacagctgcccaagggagcgctccgcaatccggtggtcgagaaggtcatcaaccagatgataaatgttgtcaatgccgcagcagaagcatatggcaagccagatgaaatccatattgaactcgcgcgtgaacttaaatccagcgcaaaagaaagagaacaggcaacaaatggtatccaagccggcaataaaaggaatcaagagattgagcagattcttaaatcgaagttcaacatacagcaacctagcaagaatgacattcttcgctataaattgtacgatgagctaaaagaaaacggttttaaaaccctttactcgaacaagtatatccctgaatctgcgttattctcaaaagacattgacatagagcatattataccgcaagctctaatgtttgacgactctttctcaaataagacgctcgagtacaaggatatcaatatcgaaaaaggcagaaccaccgccaatgatttcgtaaaagccaagtacggagacgaaggttatgcccagtattgccaacgcatagaatatttatactcaaaaggggttatcagcaatgctaagcgcaagtatttgttaatgaccgaagcggatatcccgaccggattcgtggacagggacttaagaaactcccagtatatcgccgtcaaatccagagaaattcttgaggattatgtcaaggtagttgtacccaccactgggtccgtgacggatcggttacggcaagaatggcagcttatcgacgtaatgaaagaaatcaatttcgctaagttcaggacggctggcaagacctacaccgcaatagattccgagggccggaagacagaaaagattaaagactggacgaagcgtaacgaccatcgtcaccacgcaatggacgcaatcaccattgcatttaccaagcctcagcacattcagattctaaataatttaagagcaaaatgtgacagtaatgaagagttccgtcaattacttgacagccagaccacagacacaggaaagaagcgcatcttcactcctcctatgcctttggatcaattacgcgccgaagtaaagaagcaccttgatgccgccctcgtgtccatcaaggcaaagaataaggtcgttacgcgaaatgtcaacaagataaaacaagcaggcggcatactaagaaagaccgagcttactccccgaggagccctgcataaagaacaagtctacggcaagcgaagggtttatgaagtattttactcacccgttaatgcaaagatgacggaagaggccatagctatggtcgcctctccgaaagaaaaggaggcactgctggcgagattggctgagtttggaggagatgcgaaaaaggcttttacgggcaagaattcgcttgataagaatcctttgtatgtcggcgcagagcaaattccggcaaaggtaaaatgcgtacggtttaaagatatctattcaatacggaaagagttaagtccagaccttagcatcgataagattcttgacaaaggggtcaaggccaaagtcgaggaaagaatccaagaattcggaggtgatgtcaaagctgcatttgccaatttggacaccaatccaatatgtctggacaacgacaagactattcccatcaagagagtcacaatcggagagaatttcgacttgacggctatccgaaacaagcacgacaaagatgggcgattgatacttgataaaagcggtaatcctataccaagtgattacgttaatttaaggaacaaccaccatattgcgctttacattgatgcagacgggaacgtgcaggaggccgtagtccctatgtttgaggccctcaacaggataaatatgcaaatcccggtcgttgataaaaactaccactccgacctgggctggaccttccttttcagtatgaaaatcaacgagatgtttgttttccctgacaagaacacaggattcaatccaaaggacattgaccttctcgaccccgcaaattcttcgctgatcagccctcatcttttcagggtgcaaaagcttagcagcaaagactactacttccgccatcacctggagacgactattggagatgataattcgctaagggatattacttggaaaagaattaagacaatacaactgatggcggacgctgtcaaagttagaatcaaccatatcgggaaaatcgtcgcagtaggagaatatgattaa

SEQ ID NO: 1984 - DNA, 3678 bp, Artificial Sequence
  OMNI-126 DNA sequence
atggaaaacgtcattaaacaacgcattttaggcttggataccggaactaactcgttaggttgggcggtggttgaccgacttccgttaggaggatacgagttggtggataaaggtgtacagatcttccaagaaggtgtaaacatagagaaaggcacccaagaaaaatcccgtgcagcagaacgcacatctcatcgcagtttgcggaaactttattggcgtaggaaagttaggaagattcgattgctgacagtattgagcaatgcaggcttgtgcccttcgcttacatcacaggaattgcgtgcatggcgcatgaatggcaagtatccattgaataatatcgcatttatgcgctggcaactgactgatgagcagaaaggcatcaatccctatgcggcacgttgcagatgcgtagaagaagagttagatatgagcagccctgacaatcgttatcttgtagggcgtgctatgtatcacatcgcgcaacgtcgcggattcctcagcaatcgcaaagaccaaactgatgacaaagacaaagaatccggagcagttaaggcgggtatcaaagaactgacgcagaagattcatgatgccggatgtgagtatttgtgccaatatttctatcagttgtatcagaaaggcgagcgcatccgcagttgttataccgaccgtaaggagcactatgagcatgagtttgatgccatctgcgccaagcaacatttggatgaatccttggttcagcagcttcgaaaagccatcttcgagcagcggccattgaagagccagcgtcgcggtgttgccaaatgtccgtttgaaccatccaagcattgtgcgcctgtatcccatccgttgtttgaagaattcagaatgtggagttttatccgcaatatcaagatgcaaacgccggaggatgctgagctgcgcatgctgactaatgaagagatcgataaagtaaagcatctgtggttccgcaaatccaaagcgaacttcccgtttgaagacattgctaaaacgcttgcagggaaaggtaagtattgctattacaaatcagccgaggataagccctaccgcttcaactactatatggataccagcgttgcaggttgtccggtaagcgcgcaactgcgtgatgtttttggcgaagatctgcttaaggatagggcacaggttgattctatatggttagcattggatttcttcgacgacgacctgaaactccgtgagtgggcaatcaaacattataatctggctgacgagcaagccgatgcgtttgttaaaattcgtttgccgcaaggctacgcttcgctatcgctgaaagcgatggagaatattgttccgctgatgcgtgaccacggaatgaattatccgaatgctactctcttagccaaactgcgtgatttgacgaaagactatccgtttgagaaagatttcgacgaagatgtagaagcctatctgaaagccgatattgaggaatacctgactatcccaactgacaagaacggcaaaccgctgatgtcacgcgaggaacgaaaagaagcattggatgtgaagtggatgcagcactataacctatctgcaaaggagataaagaaactctatcacccctctatgattgaggaatatcgtcatgtggagcacaccacaaacggcgtatatcagttaggttctccgcgtatatctgcactcaagaatccgatggctatgcgttcgctcttccgcatgaaagcggtagtcaaccaattgctcaaggacggaacgattgacgagaacacaatcatacatattgagttcgcgcgagaactgaatgatgcgaatcggcgtgcagcattacgaagatatcaagccgccttgcgcaaagaacgcgaagatgcggtagaggctatcaaagaattcatcccaaatccgagtgatgatgatgtactcaaatacttgctttggaaggatcaggaaggcaagtgcgtttatacaggtaaaagcatatcgctgtccgccttgtataatggcaccgagtttgacattgagcacaccgttccgcgtagtatgggtggagataccacgcgcgagaacttgacgatttgtgatgcaaaattcaatagggagataaagaagaaccgtctgccgtcacaactatcagaacaagcacaagaattgctacaagccaatatccaaacatggaaggagaactgcgaggcgttagataagcaactgcgaaagatgaaaaatgccacatccggattgagcacaaaagaggcaaaagacagcgtgattgctaaacgtcatcttttggagatgcaacgggacttctggagaaacaagtacaaagcctttacaatcgaagagaaggatgtgcaaggctttacccgcaggcaaggaacggatatatcagtaatcagccgttacggtcggttgtatttgctcagtttgttcaatcgggtggatgtcgtcaaaggatcaatgactgctgcattccgcaagatttggggaatacagacagcttatgaaaagaagaaccgcgagaatcatgtgcatcattgtattgatgctataacaattgcttgtatgggtaagcgtgagtatgacgagctctccgcatattaccatgctgatgaagaaaataagtatcatagttccgacattctaatgccgaaaccatggaagacattcacggaagatatcaaggatattgagcaagagattcttgtggcgcattacacctccaacccgatgggtaagcaaacaaagaagaaacttcgtgatagccgtggacatatcatccgtgatgccaataaacaacctcgttttgcacaaggagataccgctcgtggagctttgcacaacgatatgatttatggaatgattgtcaatagccaaaatgtggatgacaagcataaagttggcaacttatgtgccgtaaagcggataatattaagttcagttgcttctaaagatgaagaaaaaatggcagccagcatcgtagatccgattattaagaaaacggtgaatgatgccagagcaaaatatggaagtttatctgctgcaattgaggctgaacaagaaaatggagacggttctatctggctaaacaaagagaaaaacgttaagattaagaaagtgcgctgtttccaagattttgccattaacgcttcacctatccgttcattgcgcgatcaatccaagaaagaatacaagcgtagccactattcaatgacaaatggcaacttcatgtctgccatctatgagggaacagatgcaaagggaaagaagaaacgttcgtttgttattatcagtttgtatgaagcagcacaggcctacggcaaacatgagcctttagtacccactgtgagcgaagaaggctatgcacttatcaagactatacgattaggggatttggtgctcttatacgagaattctccggaagagatatacactgcttcccaagaagaattggtgaaacgaatgtacgaaattataggaatgtcagattccaaaggtctgcaaattagactaaagcatcaacaagaggctagaccaaatggagagctacagcaaattaatggagcatttaaaaatggtgattcagcgccaatcagaatgcttttgcacactcaattcaacgctctcgtacaaggacaagactttgatatatccgataccggcaaaataacgttcaagtcatgctaa

SEQ ID NO: 1985 - DNA, 3330 bp, Artificial Sequence
  OMNI-127 DNA sequence
atgggaaaattagtgttaggtttagacattggaattacttctgtcgggtatggagtaattgatatagataataataaatttgtagattatggagtaagactttttaaagaaggtgattctaacgacaatgaaaaaagaagatcatatagaagtggaagaagattaagaagaagaaaaaagaatcgtttagatgatatgaaaagtcttcttttgagtgcaggtatacttacaaaagactataaacctcttaataatatttatgaaattagagtaaagggattaacagaaaaattaacaaacaacgaattagccgctgctcttcttcatattacaaaaaatagagggactactgtcgaagctctagaaactgctgatgcagataaagaagcagcaggaaccaaagatgtattagcaaagaacgcaaaagatttagagcaatttgagtatgtatgtaaagtacagttatatcgtttagaaaaatatggaaatattaggggaacagaaaataactttaatacttctgattatgtaaaagaggcaagagcaattttaaagtgtcaagatatagatgtagaactatctgaaagcattgtaaatatcataagcagaaggagagagtattatgaaggacctggtagtgaaaaatctccaacaaaatatggaagatggatagaaaaaggagcagaaccaatcgatcttatagagaaaatgagaggaaaatgttcaatatatcatgatgagcttcgagcaccaaaatcctcatattctgctgaattatttaatttgttaaatgacttgaataacctttcaattaatggtgagaagttaactcaaaatgaaaaagaaatagttatagaagaagtaaataataatggaaaaatcactatagataaattaaagaaattattaaatattaatgatagtaaagatgttgtcgaaggattcagaataaataaaagtaatgagcttttattaacgaatatggcaatgtatgaccagtttaaaaaaatttttgataagcataaagaggatgcttatcaaagggataagtatattattgatcaaattgctgaaattaatacagctaaaaaaggtattaaagaaagatgtgatgcaattgaaaagcaattccctaattttgattataatttaatcagagatttagctgaaatgaaaaaaatgacacagtatcattcattatcattaaaagcaattcgagaaataaataaagagatgattaaaagtccgtataatcaaatgcaggcaatccatgaattaggattgcagcactatagaaaatcttacaaaggaatgaagaaaattcaagttgatgaagaagcaatattatctccagtagttaaaagagcacaaagagaaacattcaaagtaattaacagattaagagaaatatatggtgaatttgaatcaatagttgttgaaacaactagagataaaaatagtaaagaaaaaaaggaaagaattaacaaaactcaaaaatactatgaagataggaacaaaaaagttgatgagttgttaaaagagagaggatataatccagatactataaataataaaacaaagatgaaagttaagctctatcttgatcaaaatggaaagagtgcatatacaatgacacctcttaaattaaatcttattattactaatcctcacgcatatgaaattgatcatattattcctctttcaatttctcaagatgattcatttaataataaagttcttattacacatgaagaaaaccaggttaaaggtaacaaaacaccaatatatacttatttaaataatcagtttaaaaattgtgatattaataaatataaagaatcagtaaaaaataatcataatttttcacgaaagaaaaagttttatatgctctatgaaaaagatattactaagtattcaaatatgaaagaatttatcgcaagaaacttagttgatacaagttatgcaagtagagtagttcttaatacattaacctcatattttagagataatgatatttcaacaaatgttcatacaattagaggatcggctacaagtttatatagaaaaagaattggactaaaaaaagatagagataaagattttcttcatcatgctattgatgctttaattgttgcgtcaataaaaaaacaatctatttttagaaaatatttaattaaatataatcttagtgaattgtataatgaaaaaactggagaattaatcaaagttgaagaagacagtaaagtaattgatccagtatttatagaatttatttccaatttgaaaacaatttatgagcaatcatatcaatattacaatggatatatttctagaaataaaatgaaatttaaaccaattaaaatttcccataaggttgatacaaaaccaaatagaaaaatttctgatgaaacaatctacagtacaagaaatgtaaatggtgtagaaagagttgtaaaaaaagttaaagacatttatgatccaaaatttgataaactaacaaatgatattattaataatcaatatcataataagtggataatggctgaaaaggatgaacagacatttgaaattattaaatcaattgtgatggcacattttaatacttataaagaagataaggacatatataagagtaaatcaaaaaaaggtgttactacttggtctttaaaaggaagtaataatccattatcacagtttaaagaagaacatggaaaaatacgtaaatattctaaaaaaggaaatgggcctgaaattacttctatgaaatattatgaagatgaattaggaaatcatgttaatatcacaaaaaaatataatgtagataataaaaatgtagttttacttcagataagtccatatagaactgatttctatgtttcaccaaaaggaaaatataaatttgtaactataagatactgcaatgttttctataaagaatcaaataaaaaatatttaattgataaaaaatggtatgaagaggagaagaagaaaaagaaaattgatgattcatatcaatttgtatgttctttgcatcatgatgaaatattaggagttaaattagaagatggtaaaccttatatctatgatgagtcgaatgaaaatgatgaaggtttaaaaagataccacaaaggacaatatgaaattttaaagtttacagcgacaaatgatgataaaaaaaatataatagagattaagcctacttatacatattgtcaaaagcaattaaagcgaagttgtggtacgtttattaagcttactaaatttgctactgacgtattaggaaatatgtatgaagtaaaagacaatgtcttgaaattagaatttgactag

SEQ ID NO: 1986 - DNA, 4014 bp, Artificial Sequence
  OMNI-131 DNA sequence
atggtgcaagactattatttgggatttgatttagggactggttctttaggatgggcggttacagatgaaaattatgagattcttcgtgctcatggaaaagcgctatggggagtgcgcctttttgagagcgctaagacagcagaagaacggagaacattccgtacttccaggaggagattaaaccgcagaaactggagaatagaattgcttcagggtatctttgcagaagaaataaataagatagatgatggatttttcctccgaatgaaagaaagccgttatttgccggaagataaaaagaacaagtcaggaggtgttccccagcttccatatgcgctatttgtggataaaaattatacagataaagactaccaccgtcaattccctacgatttatcatttgagaaagtggttaatggaaacaaaagagattccggatattcgtctggtttatttagcatttcaccatataatgaagcatcgaggacatttcttattatctggagatattagggagattagagagtttaagaccacatttaagcagtttatagaggtggtaaaaaacgaggagctggattttactctggaaatagaggaagaacagtatccgaatgtagaacaaatactaaaaaataatcaaatgacgagaacagctaagaaaacagagctgataaaaagcttaaaagctgcttcaggctgtgagaaagcacttttaaatttgatttccgggggaacagtaaaattaagtgatatttttggcgataagcagcttgatgaaagtgaaaggccaaaacttgctttttcggatatcggatacgatgagtatgaaggagaaattcaatcggtcttaggagagcagtatattattattgaacatgcaaaagcggtatacgattgggccgtattggcggatattttagatggccaagactccatttctgctgtgaaagcagctttatatgagaagcataaggcagatttggtgtatttaaaaaagttggtaaaggaaaatttgcctgctaatatatataaagagatttttacaaaaacagaagagaaaatttcaaattacagcgcgtatattggaatgtcaaaaaagaatggaaaaaagcaggaaattcaaggaaaacgatgcagtaaggacgatttttacaagtatttaaaaaagcaagttattgagcgtattaatgatgaaaaagtcacggaatatttaaaggaggagatagacagaggaactttcttgcccaggcaggtaataaaagataatagtgtgattccccaccaaatccatttatatgaattaaatcaaattttatcgaatttacaggaacatatccctcttttaaaagaacagggagaaaagattagaaaaatttttacatttcggatcccttattatgtgggcccattaaatggggttgaaaaaggaaaagaaaggaccaactgggtaaaacgtaagggcgaagggaaaatttccccctggaattttgaagaaatcattgatgtggaagcaagcgctgaacagtttatccggagaatgactaataaatgtacatatttaatacatgaggatgtattgccaaaatattcactaaagtacagcaagtttatggtattaaatgagttgaataacctgcggttggatggagaacccatttcagttgaattaaaacagaaaatttatctggaagtatttcaacgaaatagaaaagttacccagaagaaacttaaggactatttgatacgggaggggattgctgcaaaaactgtagatattacaggagttgacggcgattttaaaagctcattgacagcctaccatgattttaaggagaagcttacaggcgttaaattagaggaagaggaaaaagaatctgttatacttaatgttacattatttggagatgataaaaagctattaaaaaagagattaaaaggacttttgccccaattgtctgacgggcagcttaccagcctttgcaatctcccatatagaggctggggacggttgtcagaaaaatttttagactccatcgtagctcctgcgccagaaacaggagaagtatggacgattctgcgtgggctttgggaaagcaatgataatttaatgcagctcttaagcgaaaagtattattttgctgatgcaattgaagaggaaaatggaaaggaaggatgtaaagaaatttcatatcagttaatccaggaattatatgtatcgccagcagtgcgccgccagatttggcagacacttttaatcgtaaaagaactatgcaaggtactaggagggccgccgaaacgggtatttgtagagatggccagagaaaagacagctaaaggaagaactcagtcaaggaaaagccgtctgttggagttatataaaaaatgcaaaacagaagaaaatgagtgggttgaggaactgaaccataccgatgaatctacattaaggggcgataaactctatttatattatgttcaaaaaggccggtgcatgtattctggtgagcggattgaactaagcgagctatgggataatcagaaatatgatattgaccacatttatccacaatcaaaagtcatggatgacagcctggaaaatcgtgtattggttaaaaaagtatctaatgaagaaaaatcggatcgctatcctatttcggaaaatatccgaaagaaaatgcagccgttttggaagtcgcttctggatgggaattttattactaaagaaaaatatgaaagattgattcgcgcgacagaatttgagcccgaagagctggcaggatttattgcaagacagctggttgaaaccagacagggaacgaaggcagtggccagcatattaaagcaggtgctgccgagcgcagaaataatctatgtaaaagcgcctactgtatcgcaattccgtcaggacttcaaatttgtcaaggtgagggagatgaatgatcttcatcatgccaaagatgcatatttaaatattgtagtaggaaatgtttattttgttaagtttactaaaaatgcctcctggtttataaaagaacatcctggcagaagctataatctgaaaagattgtttctggcagatagagtggagagaaatggcgaaattgcatgggttgcgggagaatcagggacaataggcaaagtgaagcgcactatggaaaaaaacaatattttagtaaccagacgctcttatgaggtgactgggggcctgtttgatcaacaactgatgaaaaaagggaaagggcaggtgccggttaagggaagtgatgagcggcttagggatcttcagaaatatggaggttataataaagagtcaggcgcatattttgttttagtggaatcggaagacaagaaagggaggaagatccgaaccatagaatatattccgattcgtttgaagagcaaaatgaagcaggatgaagagctgtattgttatctggaggaacagagaggattgaaaaatcctaaagtattgcttaataagataaagacggatactttgtttcaggtagatggattttatatgtggctatctgggagaacagaaaatcgattgatttttaaaggagcaaatcaattgctgcttcctccaaaaaatgtggaaactctaaaaaaggtattgaagtttgttgctcgaaaaaaggagaataaagaattaaaaattttttcagcggatagaattgaaaaagaaatgttacttgacctctatgatacttttctgtctaaacttcaaaaaacagtttatggaaaacgtttgggagcacaggaaaaaacactttctgacaaaagggatactttcagagacttagagatagaagaacagtgtatagtgctttctgaaatattacatatgtttcagtgtcaaagcggcgcttcaaatttgaaactgattggtggtcctgaaaatgctgggagtttaaagattaataatgatataactaagtgcaggcaaatcaatattattaatcaatcccctacaggtatttatgagcaggtgattgatctgcaaaaagtatga

SEQ ID NO: 1987 - DNA, 4047 bp, Artificial Sequence
  OMNI-132 DNA sequence
atgagcataaaaagtgattattttttaggacttgatattggtacggattctattggatgggcggtaaccgacccagaatatcacatattgagacgaaaaggtaaagcattatggggaataagattatttgatgcggccaatacagcggcagaacggcgaacatttaggacaagccgaagaaggattcagagaagacgacagagaattcggttattgcaagaattatttgcagaagaaatggtaaaattagacccagggttttttcagaggttgtcagacagcgcattttggcaggaggataagcaagagcagcaaatttattcactttttacttgtgaaaattatacagatgttgattattacagagaatatcctactatttatcatttgagaagtgcattgattcaggaaaagaaggaatttgatcttcgtcttctatatcttgctcttcaccatttgatgaagcacaggggacatttcctgtttaatgggagtattaataatgtgacgtcatttcatacgacgtttcagacgtttgcagattgtctttatgatgagtttgatatagaactggaatgtgattccgaagatagatttgcagaaattttaaaggataaacatgccagaaaaacaggaaaatgttctgaattagagataatctgtcatatagaaaaatcaaataagcagctaaaagaactttttaaattaattacaggaatgaaagctagtttgagtgttgtgtttggtgatgatgaattagcagaaatagaacataataagattagtttttcagagagtagttatgatgaagtacgtcttgcattggaggatgagattcaggagaggactggtatactggatatctttcatgcagtttatagttgggcgattctcgcggatattttagaaggcggagaatatgaggggaattcttatctgagcgttgcgaaggtaagcacttataaaaagcatggtgatgatttgcggttgctaagaacactggttcgggaatattgtcctgatcattacaaatctttcttttccgtatcagggaaggataattattgtgcatatgcgggtactttaaaaaagaatggaaaaaaacagccgattaaacgttgcagccaggaagatttttataaagcgttaaagaaattgctgaatcagatgccgacagatcaaccggaagtgaaagacatcttcatcgaaattgaaaatggtacttttttgccgttgcaggtaagtaaggataatggagtgataccttatcaggtaaataagatggaattagaaaaaatcctgcagaatgcagaagaatatttgccatttttaaaaaatatagatgaagaatgtggaaaaacggttagtaagaagattatagatctctttgagtttagaataccatattatgtagggccgcttaataccgctaaaggagaaaactgttggatggtcagaaaagaagcggggagaatatatccgtggaattttgatgaaaaggtagacagagatcaatcagcagaaaaatttatccgtagaatgacgaatcagtgtacatatctaatacatgaggatgttgtacctaaaaattctttgctttattcggagtttatggtgctaaatgaattaaataatgtaaagattcggtctgagaagctgccggtggagttaaaacaggcaatagtattggatttgtttaagaaacaaaagcaaataacagggaaaaaacttcttaattacttgaatgcaaatggatatgatgtgaaaaaagaagatttgtctgggtttgacgggaactttaaagcatctctgtcatcatatcttactttgaaaaaagtatttggggaagaattagataaatatagtgtgcagcagatggcagaggatattatcttgtggattactctgtatggagatgatcagaagatgttgcgcagggtaattcgaaaacattatgaacagcaattgagtgaagaacagattctttccttatcgaaattgaaattccaaggctggggaagattatccagacgatttttgagtgaaatggaaggagttgattgtgagactggtgagtgtatgacggtcatgcaaggacttcgtaatactcagaataatctgatgcagcttctaagtcagcagtttacatttatggaattgattgaggaagaaaatgggaattattatgtagatgagattacatacgataatcttgtgaaagatatggttatatctccgtcagtgaagagagcagtctggcagacagttcagattgtggaggagattaagggggtaatgggctgtcagcctaagaagatatttgtcgagatggcgcgaagcgatgaggagaaaaagcgtactgtatctaggaaagacaggttattagaagcatatgatgcgatcaaggatgaggctcgtcaatggcaggaagagttgcaaaagtattcagatggtgattttaaggctattaaactttatctgtattatacgcagatggggcaatgtatgtatactggaagaaagatagatctgtcacaattaaatgatgcgacggtatgggacagagatcatatatatccacagtccaaaacaaaagatgatagtctggataatctggtattggtagaccggagtgtgaacgctaagaaaagtgatgggatgctatcacctgagattcagcagagaatgcgggctacttggaaatacttaaaagagaaaaagttgatttcagagaagaaatatgagcgtttgactagggtctcaccacttacagatgaggaattggcaggttttattaatcgacagttagttgaaacacgtcagtcttcgaaagcagtagcaacacttttgaaacgagtatatgatgaagcggagattgtctatgtaaaagcggaagctgtttcaaattttagaagagataatttggattatattaaggtgcgtgatctgaatgattatcatcatgctaaagatgcatatcagaatattatagtggggaatgtttttcatgagaaatttaccagcaatccgcttcgttggctgaaaaataatcctaatacgaaatatagtttaaatcagatgtttaattttgatttagagaaaaatggggtggtaatatggaaaagagggaaggatggaagtattaaatgtgttgaagaaacattgaaaagaaatgatattctttttacacgatatgctttttgtaataagggtggtttttttcaccagatgttaacggcagctccagaagataaaacgaaagcaaagggacttgtaccaataaaaaaaggtatggaaacatggaaatacggggggtatacatcagtaactccgtcacattttatgttggttgcttcgaaagataaaaaaggaaaggagataagaacgattgagacggttccgttgtataggtggaaagagttcaaagaaaatccagatgcattactccaatattgtagagagttctatggtttgaaagagccaaaggtgctgataccgtgtattaagaagaatgccagattagtcgttaatggatttccaatgcatttgaaagggagtacaggaagacaattgattttgcagggagcggttcaattatgtctggataatgaaaatataaagtatctgaaaaaagtcacaaaatatttggaatgtaatgcacagagaagagataaaagaacactactggaagtaagagaggttacaggaattaacaaagaggaaaatatacaattatatgatgtgtttgttgataaattgagtaacacaatatatcagtatcgtccggcgaacccgaaggatgttcttataaaaggaaaggataagtttgtggagttgaatttggcagaacaatgtgtagtgttaggagaagtattgcatttatttcaatgtaaactaattggagctaatttgattttaataggagcttcacaacatacaggaatgataactaacggaaaaaaaattagcaattgtatttctataaaattgagtagtcaatctgtaacgggtattaaggaacgagtaatagatttgttaaatatatga

SEQ ID NO: 1988 - DNA, 3264 bp, Artificial Sequence
  OMNI-138 DNA sequence
atgaaatatatcattggtttagatatgggaattgcctctgtgggttatgcaacattattattagatgataaggagcaaccttgtcgaatcctaaaaatgaattcgcgaatttttgaagcggcagaacaccccaaggatggttcttctttagcagcaccgcgcagaattaaccgtggaatgcgtcgcagattgcgccgccgccgttttcgcaaggagcaaatccgtgatctgatagcggaaaaaggcatcatgacaaccgaagaaatcgacgaaatctataacagcggaaaagagcttagtgatatctatgaaatcagagcggaagcgctggataggattctgagcaaggaagaatttgtgcgtctgatgattcacctttcccagcgccgcggattcaagtccaatcgtaaggtggatgcatcggacagtaagtctgagtcgggaaaactgctgatcgcggtaaaaaacaatcgcgagttgctgagcgaaaaagggtatcgcaccattggcgaaatgttgtataaggatgaacgctttgcggctaataaacgcaacaaagcggatgattattccaatacgttttcacgcgctgaatatgaagatgaaatcaatcaaatttttgaagcgcaactggcgctcggcaatccatacgccaccgatgatttcagaaagaaatatctggatatctatctgtcacaaagagcatttgacgatggtcccggcggcaaaagtccttatgccggcaatcaaatcgaaaagatgctgggtcactgtacctttgaagaaaacgagctgcgcgcagtaaaggcaagctatagctttgaatattttaacttgctttcaaaagtgaatgctatcaaaatagttggagaaggcggcaaaaggtcattgacagatgcggaacgcaaaagcgtgatcgcacttgcgtttgcgaaaaattctgtaacatacgcttcacttcgcagggagttgaagttaccggacggcaaatttttcaatatttcttacggaaagggcgacaagtctgccgaggaagtcgagaagaaaacgaaatttgcttatttgacggcatttcatacgtttaagaaggcgtatggtcaggcttatgtcggctggagcaccgaaaagaaaaacgcgcttgcatacgcgctgacagtctataaaaatgataataaaataattgcctatctgacagatcacaactttgaaaaagcggagatcgagatcgcgctgacactgccatcatttacgaaaacaggaaatttgtcggttaaggcgcttgataagctgattccgtatttagagcagggtatgctgtataacgaggcttgttcagctgcgggatataattttaaggcagatgatgcttccaaacgcatgtttttgcctgccaatgcaaaagacgctcccgagttggaggaacttcgcaatcctgtagtgcgtcgtgctgtatctcagacgatcaaggtgataaacgccgttattcgtgaatgcggtgaaagcccaacttttgtgaatattgaaattgcacgcgagttggcaaaggattttaaggatcgcaagcagatcgaaagagagcagaaggaaaatcaagagaaaaacgagaagctgatggagcgcttaaggaatgagtttcatatccttaaacccaccggtcaggacttgataaagctaaagctgtgggaggaacaggacggcagatgcccctattctcaaaagcccatttccatagagaagctgtttgacgtcggctatacggatattgatcacatcatcccgtattcaatctgctttgatgacacctataacaataaggtgttggtgctgtctgccgaaaaccgcatgaaagggaaccggcttcccatgcagtatcttggcggcaaaaggcaagatgatttcagactatgggtgaattctgctcatttaaggaaacggaaaaaagataacctgcttagggaaagctataccgaagaagacaaaagcggctggaaaaagcgcaatcttcaagatacgcagtatatggcatcatttatgctgaactatctgaaaaagtatctggcgctgcagccgtccgatcagggcagaaagaatcagatcatctctgtcaacggaagggcaacggactatttgcgcaagcgctggggcgttcaaaaaattcgtgagaacggcgacacgcatcatgcggttgacgcagtgataatcgcttgtgtgacgcagggaatgatcaaaaggatttccgaatacgctaagtataaagaaacggcgtttcaacatccggaaacaaaagagtactttgacgtggacaaaaaaacaggtgaagtcatcaatcgttttccgcttccgtatcccgatttcaggaaagaactggatattcgctgctctgatgatcccatacggctgctgcgcctgtatccgctggttcagtattcctccggagaagaggtcaagccgatgttcgtttcccgtatgccgaaccataaggtaaagggcgctgcccacatggaaacgatacgaggacatttcaaagaggacggaaaggactactccgtcgcgaaggtaccactgacttctttgaagctgaaaaacggcgagatcgaaggttacttcaatcctggcagtgacatgctgctctataacgccttaaaagcgcgattggcgcaatttggcggcgatggtaaaaaagccttttccgaacctttttataagcccaaggcggacggttcgcagggaccgcttgtcaaaaaggtcaaaatagtgaacaaatccactttgtctgtgccggtacacggtggaacagccgttgccgacaacggttccatggtgcgcgtggatgtgttttacgtagaaaacgagggttattatctggtgccggtttatgtgtcggatacggtcaagcgtgaactgccgaacagagcgatcgtggcgcacaaggcgtatgaggattggaaggagatggacgaaaacaactttgtcttttcgctgtatcccaacgatttgatcaagctgacatttgccaaggaaatgtctttctctcttacgaataaaggaagcagtcttcctcctgaaatgaagtgtaaagaaatattcgcgtattataaaggcacaaatattgcatcaggtaccatcggcgttattaaccacgacaacacctatggtatcggcagtttgggaataaaacgcttgccgcatatagaaaaatatcaggttgacgtattaggcaatattacaaaagtcggcaaagagaaacgcatgaggtttcgctga

SEQ ID NO: 1989 - DNA, 3276 bp, Artificial Sequence
  OMNI-159 DNA sequence
atgaattatataatcggattggatataggaataacatcagtaggttatgctgtactaatgttgaatgataacgatataccttgtaggattttaaaaatgggctcaagaatattcgaaatcgcagagaaccctaaggatggatcctcacttgctgcgccccgaagaatcaatcgaggaatgaggagaagattgaggcgaagaagatttcgcaaggagcaaattcgcaatctgataattcaaaataatataatgacaaatgacgagataatcagcatatataacagcggtaaagagcttactgatatttacaaaatacgttgtgaagcgcttgacagagagcttgataaggaagaatttgttaggcttttgatccatctttcacaacgcagagggtttaagtcaaatagaaaagttgacgcttcagattcaaaatcagaagcagggaagctgctgaacgctgtaaagactaacaaaacacttatggaagaaaaaggttaccgtaccataggagaaatgctttacaaggatgaatgttttgcagatgtaaaacgaaacaaggccgatgattattcgaatacatttgcgcgttcggaatttgaggctgagattaatgctttttttgatgcgcaacagaagtttggcaatgaatacgcaaacgatgaaatgcgagacagctatttgaaaatatacttgtctcaaagagcctttgatgaaggtcccggcggaaatagtccatatggtggtaatcagattgaaaaaatgctcggcaaatgcacttttgaacctgatgaatttcgttcggtcaaagcggcatattcgtttgaatattttaatctacttacaaaagtcaacagcttaaagcttattactccagaagaaaagagatttcttacaaaagaagagaaggacaagataattaatcttgcgttcagcaaaaagacaatttcttacgcatcaatcagaaaagagcttggcattttagctgatacgtattttaatatctcttatggaaagggcgatataactcctgaggaaacagaaaagaaaactaaattcacctatcttaatgcgtttcatgtgttcagaaaggcttatggagacgtttttttaaactggagcaaagataagaaaaacagtcttggatacgcgctgactgtatataagaatgacagcaaaatagtcgattatctgaataataaaggttttgataaagccgaaatagatatcgcgctgactttaccgtctttcagcaaaaccggcaatctttcaataaaagccttggataagcttatcccatttcttgaacaaggtatgctatataatgaagcctgcgcggctgcaggatataactttaaaaatgatgatacttcaaaaaggaagttcttgcctgctaacgaagaagacgcgccggaacttggagatatcagaaatcctgttgtaagaaggtctgtatcacagacaatcaaggtgataaatgcgattatccgcaaatatggagaaagcccgacattggttaatatagagcttgcgcgtgagctttcaaaagcaaaaaaagatagagacaaaattgaaaaaaatcagaaagacaaccgttcgcgcaatgaggctattgtcgaagaattgaaaaatacattccacattctgcaaccaaccggtcaagatgttgtaaagtataagctctggaaggaacaggatggtatttgtccatactcgcttaaaagtatatcgcttgataaattgtttgatgtcggttatacggatattgaccatataattccgtattccgtgagctttgacgatacatataataacaaggttcttgttctttcctctgaaaacagacagaagggcaaccgcttgccaatggaatatctcaaaggaaagaaaagagatgagttttggctttgggtagataattcaaacttgagatcacgtaaaaagaagaatctattgaaggagcaaattacagaagaagacatatccgggttcaaaaaaaggaatctgcaggacacacagtatatttcaagatttctacttagttatctaaaaaaatatctggagcttcagccaaacggttccgctataaagaatacgattaaggctgtaaacggcgcggcgacagcgtatgtgcgcaagcgttgggggataaacaaaatccgggaaaacggagatatacatcacgctgttgacgcagttgtaattggttgcataacaaatccaatgatcaaaaaaatatccgagtattcaaaatacagggaactcgaatttgtgaatccgcatacagacgagatattggatatagatacaagaacaggagagcttgttaatcggtttccaatgccgtatgattggtttagggatgaatttataatgagaacctcaagtgatcctacaagagtgttacacgaaaagcccttgccaaattacgcgacagatgaagaggtttcaccgatttttgtatcccgtatgccaaagcgtaaggtcagcggagcggctcacaaggacactatccgccgaaaatacgttaatgaggtcggattagaatatactgtctcaaaagtacctctttcgtcgctcaggcttaagaacggagaaattgaaggttactttaacccctcaagcgatatgcttctgtataacgcactgaaaagccgccttgcaatgtatgacggcgatggaaagaaagcgttcgcggattcaacggagccttttcgcaagccaaagcatgacggaacagacggtccaatcgtaaagaaggttaaaatacaaaacaaagcaacgttatcggtacaggttcaaaacaagactgcaattgcggataacggttctatggtaagggtagatgttttctttgtcgaaaacgaaggctattatttagtgccggtttatgtatcagacacggttgcgcttgatttgccgaacagagcaattgttggcggaaaaccttattctaaatggaaagaaatggacaatgataattttgttttttctttgtatccgaatgatttgattaaagtcaaatcaaaaagggatatgaaattcaatcttgtcaatcccgacagtactttagcaaaaaattataccgcaagagagagtatgctgtattataagggtacagatatcagtacggcagctatcacggcaatcaaccatgataatacatataagcttcgcggccttggtgtaaaatccctattgagcatagaaaaatactctgtggatgttttgggtaataaaaccaaggtaaacaaagaaaagcgtatggggttcgtataa

SEQ ID NO: 1990 - DNA, 4185 bp, Artificial Sequence
  OMNI-169 DNA sequence
atgagcaaaatcttgggaattgacttaggcacaaactctattggtttggcaatcagagatacagataagggagaaacttttgtagaacaagtagatttcttcagttcgataatattcaaatccggtgtcggcagtggacaagcaggagaattttcatacgcagccgaaaggacaaagaaacgttcaataagaagattatatcaatcaagaaaatatagaatatggaccacacttgctttactgatagaaaacggatattgccctctatcaatagaagatttagataagtggagacgatacgacaaagaaaaaggattgaaaagacaatatccaattgaagcaatacaatttgaacaatggataagattagattttgacggagatggcaaacccgactacataaatccttacgaattgcgtgcagaaataatgcaaaaacaatttgatttcaacgaagaaattaatcgatacaaattaggtaggattctgtatcatataacccaaagaagaggcttcaaaagcagcaaaggagaaacgctcaaagaactttctgaaaatgagataaatgaagaccttgatttgtctgttgctctacaaaaatctgaggaaaagaagtctcaaaaactaaaagatttcatgaaagaacacaacattcctactgttggttgggctttctatgaacttacaaaacgaggaatcagaataaaagaaagcgaataccaagctgtaaggatacaatacaaagaagaaatacaaaagatatttgaatttcaagaaggattagatacaactagcgatttttacaaacatctcatgagcgaaaagaaaggcgaaggaacaattttctacaaaagacctctccgttcacaaaaaagtaaagtcggtacttgcacattagaaacaggcaaatcacgctgtccaatctcacacccggaatttgaagaatacagagcatggagctttataaacaacatcaagtatagaacaagtactactgcagaatggaaaactttgcctttgaacctcaaacaagaactattcaaagataaatttctcagaacaaagtcatacttcaaatttgaagaaattaaaaactggctctcttcaaaattgtgtcttcaattggaatacaccaacaagaaagaaacttcaaccatcaactacaaagataagacaaatgttgtcggctgtccgatttcagcacgattgaaaaacatattaggagaagactataaacaatggaaattcaatagtgataaagaacgcactaaccgaaagacaggagaagttcacagaataacctatgactatcttgacatttggcatatatgtttctcatttgacgaagcagaatttgtcgaagaatttgcaaaatgcaccttgaaacttgacgacaaacaagcaaagaaactttgcacacttcacaacaacatccagcaagaatacgcttcgttgagtctcaaagccattagaaatatcaatccgtttttacaaaaagggttgatttatactgatgccgtactcttggccaaattacctgaaatattcaaagacaagtggaatgaagtagaaaatgatattgtagcagctattgatgacatcatcaaagaaaacagatacgaaaagggaatattagatatcgtaaatgacctaatagccaactacaaatccttagattacggcgagcgatttgcagaacacaatacagaatacatactacaaagtcaagattacaccgatattgagagcaaattaaaagggcattttggcgagagaacatggaatgcaaaaccatgcgaagagcaagaacaaataaggaaagacgttcgtgagttgtatcaaatattctttggaagttcttcaagaggttatttcaaacagcccaaagtttcagaaagccttgccgaatatctgaaaaagcaatacacctacttaaatgatgatgacttgaaaaagatatatcacccatcaatgatagaattctaccctaaggtaaaaccaacactcttagatgataacaaatatgtaaaacttcttggcagtcccgttataggagcattgaaaaaccctatggcgatgaggattcttcacaccctacgcacccaaatcaatcaactaatcaaagaaggcaaaattgatgaatatacaaagattgttgtggaaactgctcgcgaagtaaataataccaacaagcgatgggcaatagaagaataccaacgaaaacaagaagaggaaaacaaagaagtagagaaaataatcagacagtactaccaaaaggacaacatttctgatgacgaaatcaaaaaagcaaaaatattacttgaccaatttgatgtagagaaagataacaaacaagaaaagaaacaagatacacaatcagacaagctaagcgatacttggagcaaagtaaaaagcaacaacataaaaagatacaaattgtggcttgaacaaaactgctgttgtatgtacaccggcaaagtaatacgcataagtgaattatttgacaatgataagttcgacattgaacatacaatacctcgaagcatctctttcgatgattctctttctaatctcacaatatgcgattctcatttcaaccgtagcataaagaagaaccaaataccaacacaacttgacaactacaatgagataaaatctcgtttggaactatggaaacagaaggtcaaatccctgaaagaaagagttgaatattggaaggaacaatcaaaaatatcacagacaaaagaccgaaaagaccaatgtatcaaacagagacttctatggcagatggaacttgattattgggaaaagaaacttgcttcatttacaatcaaagagttcattgacggtttcaggaacaaccaattaaatgacacacgtatcataacaaagtatgcatttcattatctgaaaacagtttttgaacatgtcagtgtacaacgtggggaaatcacttcgaatttccgtaaaattgtaggcatacaaaaagaagacgaaaagaaagatagaagcaatcactctcaccatgctattgatgccgcaatacttactctaatcccaagtgcaaaacaaagaaacaggatattggaaacattctaccaaatgaaagaatctaaggaaactaacaacaaagacaaattggaaaaaacaacaaaagaattagaaaaagcaaaacgtgctgccttgataccaaatgccgttgcggcaataaaagatcatatagagcaaaatatctttgttaatcacatttccaaagaccaaacacttactccggccaaacgaagaaaacgaatcagaggtaagattgacaaaaataaacaatggataataacaggagactgtatcagaggtagtttgcacaaagacagtttctatggttgtatcttaattgatggcaaaaaatatttcgttatcagaagagcattaaaatataaagcaaatgacaaagataaaggtttcaagacatggaatgaattagaaaatgccattgttgataaagcattgtatcgtcgattagtaaaaccattctgtcaagagggagcagaagaaccttctattgatttcaaaacagtcatgttagaaaaaggtggattatatgataatggcataaaagtaagacatattcgttgttatacttccgtgaaaaatcctttacaaataaagaaacaaacttacaaatcaaaacaaggctacaagaactactattatgcggaagttggcgatttatacacaatgtgcaagtatgagaacaaaaaaacaggggaaatagtctatcaaccatataacctatttgaggttgctgctaaccataaaatcacccatgagtttattccgtccaagtatgacgacaaagttcttacacaacaattagtcaaaggagatatgttacttatctacaaagataatcctaacgaattgtttgagatggacaatgtacaactatctaaacgtctatatgtaattgatggttttgagagaaaatcatgtttgacaaaactcattcgtagctcaaatgcccaacaagacaaagaattaggtaaaggagaaagcatcaaagacttcaataatcttccacaaaaaataaggcaaagcataaataagttgcactacttgcttcgtggtattgattttaagattataaatggaagaatagagttcttgaataaaacgaagtattatgattaa

SEQ ID NO: 1991 - DNA, 4470 bp, Artificial Sequence
  OMNI-173 DNA sequence
atgaaaaatattcttggattagatttaggtacaaatagtatcggatgggctgtaatcagtcatgacggtatgtgttatagtggaataaagtgtgccggaagccgtatcatacctatggatgcagccacaatgggcgattttgacaagggtgttaccaagtccagcgcttcagaacggacacagcagcgcggaatcagaagattgaacgaacgttcattgttaagacgtgaacgtctgcatcgtgtgttggatataatgggtttcttgccagaacattattctcggaatttgactcgttatggcaaattcatcagtgaaaaagtgaaattggcttggactgacgaaggtcgtttcttgtttgatgcatcgtttaacgaaatgttgcacgaattccgctctcaacatccttcattgatggaaagcggtaagaaaataccatacgattggactgtctattacttgcgtaagaaagccctttcatatcctattaataaatttgaattagcttggatcttactcaatttcaatcaaaaacgtggttattaccaattgcgcggagaagaagatgatgaaaaagcttccaacaagtgggaagaatatatgtcattgaaggtgttacgagttgaagattcaggtgaaaaaaccggaaagtatacctggtatcgcgttcatctcgataatggtatgatatacaaccgcaaaagtaatattccccttgattgggaaggaaaaacaagagattttatcgttacgactgaattgaacaatgacggaacgcctaaaacagacaaagagggaaactttaagcgttccttccgttcgccgagcgaaaacgattggactctgatcaagaagaagacagaagccgacattgaaaagtcacagaaaacagttggaacatacatctatgaatcattgttacagaacccgactcagaaaatcaggggcaaattagtgcgtgttgtggaacgaaaattctatcgttcagaattaaaactaatattggaaaagcaatgtcgtttcctgcctgaattgcaagatgctgccctgttgcaagcatgtctggaagagctttatccgcacaacaggatgcatagggatattatttccaataaaggttttacgagtcttttcattgacgatatcatattttaccaacgtcctttgaaaagcaagaaatcccttattggcaattgtccttatgaatggcacagctatgtagacaaaacaaccggcaagacaaagactgtttataacaaatgcatagccaagtcgcatcctctttaccaggagttccgtttgtggcagttcttgtcaaatctgcgtatttacagtaaaggtacatacgagcaggatgtcaccacccgactgttgcccgatcaggaatcgtatgctgcccttttttcatggcttaatgatcgtaccagtatcaagcagaaagatttcttgaattattccggtttcaagctgacaaaaactgaacaaaagaactatcgttggaattatgtagaggacaaaacttatccctgcaacgaaacacgtggagaaattttaaaacgcatattagactgcaacttgcccgaaatattcttgaccaaggagcgtgaattgtcgctttggcatatcctgtattctgtagaagacaaagaacaatataaaaaggcattggaaaaatttgccgagaaaaattccattgattctgctgatttcgtagcagcttttgaaaaaatggcagcatttaaaaaggaatacggaagctattcggctaaagccgtttcaaagctgttgccgctaatgcgcagaggttcgtcttggtcggaaaccgaaatcgacaagaatactcttgaacgtatcaacaagcttattgatggtgaatatgatgaacaactttgcgaacaagcatatgaaggagttgcggggctatccgatgtctcccaatttcaggggcttcctgtttggctggcatgttatattgtttacaaccgtcattcagaagcaaccgacgtttcacgttgggagtctccggatgacatagacaagtacttgtctgattttcgtcagcactcgttaagaaatcccatcgtagaacaagtcgtattggagtgcttacgcactgtacgtgatatttggcgtcaggtcggtcatatcgatgaaatacacgttgagttgggacgcgaaatgaaaaatccggccgacaagcggaagaaaatgacagaaagcattttggaaaacgaaaaggcgaacttgcgagcaaaggccatgctgatggaactgatgaatcccgaaatgaaggtcgaaggagtgcgccctcattctcccggtcaacaagagctgtttcgtatttatgaagaaaacgtcctgaacagcgagaaagtacctgacgacatcacagaaattcttgcaaaattcaaccagacagataatgccaaacggcctacatcatccgaagtgaaccgttatcgcttgtggttggaccaaaaataccgttcaccatatacgggcgaaatgatttcgctaagcaaactgtttacctcggcttatgaaatagagcacattattccacaatcgcgttatttcgacgattcttttagtaataaggttatctgtgaatctgaagtaaacaaattaaaatcgaacttgttgggccacgagttcattaaaaagcatcaaggcgaaaaagtacagttgtctatggggaaaaccgttgaaatactttccgtagaagcttacgagaaattcgtaaacgagcattattcctataaccgggtcaaaaaggaaaaacttttgatggacgatattcccgaaaagtttattgaacggcagatgaacgattcccgttacatcagcaaattagttaaagccttgctgtcgaatatcgtccgtgaagaaggtgaaaaagatgccacttccaaaaatgtaatctcttgtacaggaggcattaccgaccggctgaaaaaagattggggaatcaacgatgtgtggaatggtatcatattgccacgtttcatcagaatgaatgaaatcgacaagaccaacagctatacggccattaatacttcaggcaatatcattcccgatatgccgtttgaataccaacgtggtttcagtaaaaagcgtatagaccatcgtcatcatgccatggatgccattgtcattgcatgcgcttcgcgtaacgttgtaaattacctgaataattcttctgccgcgaaagaatctgaagccgggcggatggatttacgcaacaaactgtgcaacaaaaactatacagacgataaaggcaactataaatggattatcaggaagccatgggaaacttttacgcaagacgtaaaggaaacgttgcaagacatcgttgtcagctttaagcaaaatctgcgcatcatcaataagagctcaaacagaaccctgcattttgaagagggcaagaaaaagctgcaaaagcaaacaaaaggagacaattgggccatacgcaaaccgatgcacaaagacactgtttatggagaagtaaacctgcaacgcaccaaggaagtctctttcaaggaggctttgaagcctgattatgctattgtgaacagggatttgaggaaaaaggttcttagcttgcaggcctcgggatatgatgtgaagcagatgatgaaatattttgaatcagaaaaagatgtctggcaggatgtcgattttaagaaaataaaagtccgctatttcaccaagacaaccaatgaccgctactttgctactcgcaagccgattgacagtagtttcaacaaaaagaagatagaagaaagcattaccgataccggcattcagaaaatcatgcttcgccatttggaaaacatgggtggaaaccccgaactggctttctcttccgatgggttggacgagatgaataagaacatcagggcattaaacaatggccggttccatcagcccgtttacaaggtcagaatctatgaaaaggccgacaagtatgccatcggtgaaaaggggcagaaagctaaaaagtttgtagaagcggccaaaggtacgaacttgtttttcgccatctatgaaaatgagactgttgataaatctacgggtgaaattcttcgtaagcgtagtttcacaactatcccgatgaacattgtaatgaatcgtttaaaacaagggctaagccctgtgcctgccaatgactgtggcaaggatgctaaatatgtgctttcgcccaacgacttggtctatgttcccactaaggcggagcttgaacacggcgttgatatggcctctcttgataaagaccgaatctacaaaatggtgtctgcagatcgtagcaacagccattttgtcaaagaatcggttgcaagcccgattgtcaataaggtcgaattcggaagtcataataaaatgcaatgcgctgttacaggagagatgataaaggaaatctgcatacctctgaaagtagaccgtttgggcaatatcatcaagatgggttaa

SEQ ID NO: 1992 - DNA, 4470 bp, Artificial Sequence; identical to SEQ ID NO: 1991
  OMNI-174 DNA sequence

SEQ ID NO: 1993 - DNA, 4470 bp, Artificial Sequence; identical to SEQ ID NO: 1991
  OMNI-175 DNA sequence

SEQ ID NO: 1994 - DNA, 4329 bp, Artificial Sequence
  OMNI-185 DNA sequence
atgaaaaccattttgggattggaccttggtccgggaagcataggatgggctttggtgaacgtggaaaacggcaagcccaaaagtattataaaggcgggaagccgcataattcctatggatgcgggagaaatgagcgactacgaaagcggcaagctgcaatcatcggcatcggtgcgtactgcattccggggaatgcgccgcttgtatgagagggcggcgcttcgcagggagaggcttcttagggtactgaatgttctcggctttttgccgcagcattaccgcgaccaaatagattttggcgaacatccgggaaaattcaaaaaccacggcgagccgctgctgccatacaggaaaaacgaggcagggaaaagcgagttcatctttcagccgtcattcctcgaaatgctcgaagatttcaagaaaaacaatccgcaggtcttggatgacggcagacttattccccgcgactggactctttattattgccgcaagaaagctcttgaccgtgaaatctcgcgtgaagaactggcttggatattgctgaacgccaactccaaacgcggatattatcagcttgacgaggaaaaaaccgaaaaatcaaatgcggagaaggaataccgccgtgccaaggttcttgatgtggaaaggttggaagaagaccgcaagcagaaaggcttttacttctacaagataacatacgatggagggcttacgcaaacgaggaaatgcaaaatgcagccgtggcgcgttggcgacgaggtggatttgattataaccacgccgcttgacaagaacggcaagccgaaaaaagacgaagacggcggaataaggcaaaccctcagcagtcccaaagaggacgactgggggcttgtgatgcaaaagacacaggccgggatagaccacagcaattgcaccgtgggcgaatatatctacaacagtctccttgaaaatccgtccgaaaaggtgaggggtggaattgtaaagacaatcgagagacattattatatggaagagcttagaaagatacttgagtcgcaggcaaggttcatacccgagctgtgtgatcacgaactctacatgaaatgcgtaagggaactttaccgtaacaatgaagctcacgtgaacgagttgaaacgcggcaatattgttgactttctcataaaagatgtaatctactatcagcgtccgcttaaaagcaagaaaagctgcatagccgattgcccgtacgagagctacacttatgtggacaaggaaaccggggagataaaaaagcgtcccttgaaggttatgcccaagtcccatccgctgtttcaggagttccgcctgtggcagttcatacgcaacataaggattaccgagaacgagaagatagtggacggacgcaagtattttggttatgatgtaacggcaaaatatctcggaacgcccgaagacgtgtgccggctttacgaaaaactgtccgggtatgagaacatagccgaaagcatagtgttgaagtcgttggggcttaatgcaaagatgttcaaatggaactacggctcaaaaaaagagtttcccggcttgaaaacgcatcacgagtttgccacgagaatagccaaacttgaaaaagcaagggaacttacgcaaaaagaagaatacaagctgtggcatatactctattccgtgagcgacagagacgagcttgaaaaagccctgaagcatttcgccgaagaatgtggctttgacgggcagagtttttacgaaaaattcaagaccgttccgaatatgcggggcgattacgcctcatattccgaaagggctgtaaagcgtttgctccagcttatgcgctcagggaaatattggaacgaaaaggagattgacgaggcaacgctcaagcggataaatgcaataatagaatacggctatagcccttatgaggagttttcggagttcaagcgggtggacgattttcaatatttgcagctttcagacgcttgttatgtggtttatgggcgacattccgaaaacgccgacaacagtgtgtggaattcgcccgaggaaatagacgaatatatcggaggcgagttccgcaaaaactcaatgcgaaaccccgtggtggagaaagtggtggctgaaacgctaaaggttgtgagggatatatggaaaacctacggcaaaccggcggaaattcatgtggagatggcgcgaagccttaaagaccctaacgacaaacgcaaggaagccacggaaagaatggcagcaaaccgaaaggaaacaatagacgtgcgtgaaaaactgcaggaactcaaagacgaacacaaggcggacaatataaatcccaattcctttatacatatattgaaatacaagctgtggaaagagcaggggggccagtcgccatacacagggaaaagcatatcgatagcaagactcttcaccgatgaataccaagttgaccacataattccccaaaagcggtattacgacgattctttcacaaacaaggaggtgtgcgagagcgcggttaatttggacaaaggcgcacggcttgcatacgagtacatacttgccgaaggcggaaaggagataaatgtaactataaacggcaagcacgagaaaattgctatattacccaaggaacaatatgaggaatgggtgaaaaaacattgcgtgagagaaaacggaatcggcagaaagggcaaaaacctcatgatgacggatgtaccggcttcgttcaacgcctcgcagcttaacaacacccgctacatagcccgcaagacggcggaaatcctgtctcacatagtgcgtgagggtagcgaccccggcgcgcgttccaagaacataataatgacaaacggaagcataaccgaccgcttaaagaaagactggggactgaaacagatttggaacgaacttatgcagccgagattcgaacgccttaacgacaaaacccaaagcaacgactatggcgaggatgttgtagacgctcatggcagacactacttccaaacaaaagtgccggaggggcttgccgaaaaattcgacatcaagcgaatagaccaccgccatcacgcaatggatgcgatagtcatagcctgcacatctctaaaccatattaattatatgaataacctaagtggcggggaaaaggaacgctatgacctgcgcagggtgttgtgcgaaaaagacagcagagcgtttttgaagccttgggaaacgtttacgcaggattctcgcgaagctatgaacaacattgtcgtgagcttcaagcaaaacctgcgcattgtgagccgcgcaagcaactattacagccattatgttgacggcaaaaagataattgaaaggcaaaccaagggcgagcatttctctattcgcaagccgcttcacaaagccacgtattcgggactcgtaaggctgccatacactaaaatggagaaaatagagaacaccatagacaatcccgagcagatagtagacaaaagcatacgcaaaggactgaaggaaattcttgtccaatataatggcgctgccgacaaaaagaaaatcaaaaagtatttcaaggacagggactataagctgaacggcgtggatgtggctaaagttgaagtgcgcattgtgccggaacaggcagggcattccgcacaccgcacggttcttggctcaataacaaacagaaagcagcttgattccatcacggattccggcataaagaaaatcctgcttaatcatttggaaaactacggcggcaattacgaggaggcgttctcgccggagggaatcagcagcctgaatgacaacataaggcagttgaatggcgggcgcgaccataagccggtaaaatgcgtaagggtttcggaaaaattctctttgaagttccctgtaggacaaagtggctctaaaataaaaacttatgtagaaacagaaaaagggacaaaccttttctttgccatatatgtagatgaagaaggaactcgtgtgtttgaaactatacctttgaacgttgtagttgaaagaaaaaaggatcatcttcccgcggtgccggaatgcaatgaaaagggagacaaacttctgttttccctttcgccaggcgatttggtatatgtccccgaagagggtgagcatattgcaatgccgcttgaccctaagtgcatatataaaatggtgtctgcaaatagtggagtgtgctattttgttcctcaaaatgttgccactcctatagcggacaaaatagaatttggtattaaaaataagtcagaacgtgatttgaatggcaatcaaatcaaaaaagtttgcctgaaacttgaaaccgaccgtttgggaaacatcataaagattacaggaaatgattaa

SEQ ID NO: 1995 - DNA, 3783 bp, Artificial Sequence
  OMNI-215 DNA sequence
atgaaaattttaggcctcgacttgggcataggctcagtgggttgggctcttattgagaccgacgattcgcgcaatcccattcgcatcatagatatgggctgccgcatcatacctgtttctcctgatgaaacaaaaaactttgaaaaaggcagcgcagaaaccatcaacggcaagcgcacattcatgcgctcagcccgcaaacgcaactaccgatacaagatgcgtcgctctctactcaaagccactctctcggcattagggatgatcgaccagaagtcggaggttgctctgcgcagtctctctccgatgcagttgtggcagctgagagccgacgccgccacccccggcaagcagatcacccttgcggagcttggccgggtgctcatgcaccttaaccagaagcgcggctaccgccatgccaaaaccgatggtaatgattccaagcagacccagtatgtgcagggtgtcaaccgtaattatgccgacatcaaagatctcggcatgaccataggtcaataccaatacagcaagctgaaggagtcggagacccacacagccaaagggtgcagttttgtgatgcaccagatcagggataccgtgtatccccgacaggcctatatggaagagtttgacactatcatgcaggtccaggcccggtattatcccgcgattctcaccgacgaagtgatagctcgcctgcgcgacataatattcttccagcgtccgctcaagtcgtgcaagcatctggtgtcgatgtgtgagtttgagagccatgtcgtgcataaaaaggccgatggctccgcagtgacagtaggcccgaaggtggctccacgcacctcacccatagcccaggccacacgtctttatgaagccatcaacaatatcaccatagtcaattcggccaatcgtggaaataaagatgtgaagctctatgacgaggctgatttcttcaacggcgtggtgccggtggctcttcgcaaaaaagactatgtttaccgcctgaacgcagaggagcgccaacgcatcttcgactatctcaacaccaacgaaaagctcaccgccaccaccctgctcaagctgctcgggctcaaaaagagcgacggctttgtgcccgacaaggccataggccgaggcatcaagggcaatgacacttatgtcaggatagcatcggcgctcggcgattatcccggcaaagaggagctcctgaagtttgatctcgacattgtcgactcgggtgttgtcaacgccgatagcggagagatactcagcattgtgtcggccgatgtgataaaacaaccgctctaccgactgtggcatctgctctattcagtttccgacaaggatgagcttgccggggcgctcggcaagcagtttggcatcaccgatcctgaagtcgtagaccgcctgtgtgccatagatttcgtcacccccggtttcagcaatcgctcggccaagttcatgcgcaagctcctgccgcgcctgatggacggtatcacctatgccgatgccgccggcgccatcggggtcaaccactccggcagcatcacctcggccgacaatgcgcagcgcccccttgatgaccgcctcaagcttttggaaaaaaatagcctgcggcagccgttggtcgaaaagattctcaatcagatgatcaatgtggtcaacgcccttgtcgagcggtatggtgcgatcgacgaagcgcgggtcgagctggcccgtcagctcaagcagagcagcgaggaaagggtccgcgccacccagtcgatatctaaaaacgagaaggaaaatgccgatatcgaagccaagatcagagaatttggcatcagaccgtcgcgtagccgcatccagaaatacaagatgtgggaggagagcggaaaggtatgcatgtattgcggcattgaagtaaaagacaaggaatttcttgagagccacgatgccgaggtggagcatatcatcccgcgctcgctctatttcgacgacagctttgccaacaaaacctgcgcctgccataagtgtaaccatgataaaggcaaccgcaccgcctacgactatatgtcgagcctcggcggcgataaatttgccgcttacgagcagcgtgtcgacaatctctatgccgatggcaagatctcgcgccgcaagcactcatatctgctgatgaagcagagcgagatccccaccgacttcatcgagcgcgacctcaggcagagtcagtatatagcccgcaaggcgcttgagatccttcgcggcaccatccgcaatgtgtgggcatcgtcgggtgccgtgaccggttttttccgccacgcctggggctacgacaatattctccacgatctcaatgtcgacaagtatcaacttgccggcctggtagaaaacgaggagtatgaacatcgcggtcagaagcatgtccgtgcccgcatcaagggttggaccaagcgtcttgaccatcgccatcatgccattgatgccctcaccatagcgctcaccactcagggctatgtgcagcggctcaataatctttcatcccagcatggcaatctgtttgacgatctgactcaggagaatgttgagctgcgagacaactcctcgttgctcaccaagtgggctgctacccgacctcatttcacggttgaggatgtggcgtcgagagtgtctgagatagccatatcgctcaagcggggtgtcagacttgccaccccggccaaacgctacatacgccgcggaggtaagcgcgtcctgagtcagacgggcatcgtagttccgcgcggctctctccatgaagaatccatatatggccgcatcagggtgtatgatggcgccaaggcctataaggatgcgtttcagaatccgcaccttgtggtcaacaacgaggtgcgcgaagagatcgagcgccgcattgccgatgccggcaatgatgtggcaaaagcgctcaaggctctcaagaaatcaccctttacagtggtgataaatggcgagcagcatactcttgacacaatcccttgctatcgcgaagagatagtgctccgctacaaagtggacggactaaaggctaccgatgtcaagtatatcgtcgacaaagctgtgcgcgaggcagtggctgagcgctacgatgagtgtggcggcaatcagaagctcttccaaaacagcgtgaatgctgatcctatatgcctcaaaggctcgccgatgcctatcaagagtgtacgatgcatgacaggtcttaatgcgggctctctcgccggtgtgcgcaaggatggcagtggcaagatcataggcttggcaaagaccggcgacaatcaccatgttgcattctaccgcgatgagaatggcaaggagtgctctatgatcacatcaaggtggggcgccatacggcgcaagctcaatggcatcccggccgtggttaccgatcctgcggcagcctgggtgcgccttgagtatatagccgacgaggctgtggcagccgagatagcagcatcgttgcctatgccgggatggcagtttatccaaagcatgaggcgcaacgatatgtttgttctcggcatgggcgacgaggcatttgccgacgccgtggccgcaggcgatcaatcgaccctcgccagacatctctaccgtgtgcaaacgatatcaaatagtgattatcgttttagaggccatacagagaccacggtagatgaatctaatgaggcaaaggttatgaaaagtgtcctaaggatacagtcgtcaggtgcgcttgccgcgctcactccccgcaaggtgaaggtgtcgcttaccggagagatcatccctctgtaa

SEQ ID NO: 1996 - DNA, 3648 bp, Artificial Sequence
  OMNI-218 DNA sequence
atgagcaaaaaacgtattttaggacttgacacaggcacaaacagtctaggttgggcagttgttgaccaggaagaaaacggtcagtacacattaattgacaaaggcgttgtaatcttccaggaaggagtaaaaattgaaaagggtgtcgaatccagcaaagcagctgaaagaacggagcacagagcacttcgcagacattattttcgcaggcgtttgcgcaagatcgaggtattaagggttttggtaaaatataacctctgccctaccataacggaagaagacctgaatttatggaagttgcacaaaacatatcccaggaaggacgaattcatggtgtggcagcacacaaatgacaacgaagacatcaatccatatcattgtcggtacacctgtctgaacgaaaatttagacctggacaggcaacaggacagatatatactggggcgtgccttatatcacatggcgcagcgcagaggtttcctgagcaaccgactggatgcaacggaagaagatgaaaacggagcagtaaaaagtagcattgccaacctaaacaaggaaatagaagagaacggctgtaagtatttgggcgaatacttctacaaactatataaggagaaaggaaataccgtacgcatacgcacacgatataccgacagagagcaacattataagaaagagtttttcgccatttgcgaaaagcagaacctaccaaaggaaatggtagaagctctgacaagagccctatacttccaacgtcccttaaaaagtcagcggcagaacgtaggaaaatgtacatttgaaaaggggaagccaagatgcagcgattcacacccgacgtacgaaatataccgaatgctatctttcctgaacaatgttaagatacaagggccttgggatgaagaccttcgtccgctcaacgaagaagaattgaagcagatagacaagctattttacaggaagagcaagccaaacttcgactttgaagaaatagccaagaagattgcaggcaaaggcaaataccaatggaaaggagacaccaagacggatttgccatacaaattcaactatcgaatgtcgcaaggtgtgcccggatgccccacaattgcacaactgaaggaaatctttggcgagaattggaaagagaacattgccgaaacctatacacttaacacaaaaaaagatggcacacataagagtgcggacgaaatggttgatgatatctggaatgtactcttcttctttgacagcaaggacaaggtaaaggaatacggcattaaacatctacaattggacgaggatcaggccgataagttctcaaaaatacgcctcagccgtaattacgcctctctctcattgaaggcaattaggtatatccttccatttctacataaggggatgatatattccgatgcagttttctttgccaaaattcccgttatcattgggcaaagcctatggcagaaacgccagcacgaaataatggaggacctctcctacgccatacacatggcgatgaaagaaaagcaacgcattgatgatgctgtgaaagattacttacagaacaactttgatttgaaaccaggagcagcagatatgctctatcatccctctatgatagaaacctatcccgatgcacaaccagacaaaaacggagttgtattactgggcagccctcgcacaaacgccataaaaaacccaatggcaatgcgctctctgcatgaaatacgcaaggttatcaacactctgataaaggaaggtaaggttgcaccggatacagaaatacatatcgaatatgcaagggaactgaacaacgccaatatgcgagctgcgattcatgatttgcaacgcgaaaaagacaagaagcacaaagagtattcagaaaatatccgtaaactctacaaagaagcaaccggcaaggatatagaagctactgaaaccgacatactcaaattccagctttgggaagagcaaggtcacatttgcctatacacaggagatgagattggcattgcagatttcattggagcaaatcccagtttcgacatagagcatacaattccccgaagcgttgggggtgacagcacacaaatgaatatgaccctttgcaatacccattacaatagatttgtaaagaaagcctatatacccacgcaattagccgaccatgagtttattatgaccaggatagaaccctggaaggaaaaaatcgaagatctgacaaaacagattaaccagattaggacaagcaatatttgggacaaagcagccaaggatgcgaaaatcagaaagaagaaccgcctgttggaagaattaaagtactggaaaggcaaatacgacaggtttactatgaccgaagtgccagaaggctttgcccgtcggcagggagcaggaattggtcttatctccaaatatgcagcattgtacctaaagagctatttccatgatacacttcatcctgagcatagacaggtatatagcatcaagggaaccataacgtcagatttccgcaagatgtggggcatacaggaagaggacgaaaagaagtcaagagacagccacactcaccattgtattgatgccattgttattgcctgcataggcaagaacgaattcaacatgatgggacaatattatcatgtacaggagaaattcgaaaaaggcgagggagaaaaacccgagttcaagaagccttggccaacattcacccaggacctcaaaaaaattaaggaggaactggtggtagttcacgacacacctgacaacatgcctaaaaaagcaaccaagacgattgaaattagcaagggccggaaagtcgtcgcaaaaggagactgcgcacgcggcagccttcaccaagacacatattatggtgcaatagaaagagacggaaacataaagtatgttgtacgcaaaccgctgtcatcctttaccagcataaaggatttagacaacattgtggacgatgcagttcgccaggcaattctcaatgcgatagaaggcaaggacttcaagaaagcacttgcagaacccatctatatgaacaaagataaaggcattttgataaagaaagtaaggtgctatacaccttctataacaaaacctttacacatacgtacacatagggacatatcacaaaaggaatacaaacaacagttccatgttgctctggatagtaactattgtatggctatctatgagggagaagtgaaaggaaaaacaaaacgtacgtatgaaataataaacatgcttgatgcagctgcctatttcaaaaaaagctcgaatcttgccaaacaacatccaatagccccagagaacaaaaacgaacttaaatatagatgttctgtacatactggaacgcaagtcctgcttttgcaatcggatggcgaaaatataaatctcgagaacaaagacgatatagcaagacgtctttaccatgttgctgtgatgcgaagtgatggacgtatagttcttcgctacaatcaagatgcaagagacgctacaacattgaagaaagagcgtaaatctggtgcttacaaagtgggtgagcaatacagatccgaaataatgttatctctttctgactttcatgctctagtagaaggatatgacttcacaataacgcctttaggtgagataaaactaaaacattga

SEQ ID NO: 1997 - DNA, 4074 bp, Artificial Sequence
  OMNI-231 DNA sequence
atgaataataaagaatactttttaggattggatattggaactggaagtgttggctgggctgttacggatactcaatataatttaattaagattaacagaaaatatgcatggggagctgttttatttgatactgcaaagggagcagaagagcggagagtaaatcgatgtgccagaagaaggtatcaaagagaaaaacaaagaattaacttgctgcaggaattatttgaagaagaaatatataaggtggacagtggattttttcatcgtttaaatgaaagtagatatgtatatgcggataaaagggatgaaaagggtgaaaaacctgaattaccgtattctttgtttgtagatgaaaattatacggatgtagattatcacagggaatttcctacagtttatcatttgcgtaaggcattaatgacagaggacagagcattcgatgttcgtttgctgtatctggcaattgctcatattataagaaacagagggcattttttatccaatatgggtatggatgaagtaaatttagattttagtaaaatattcggagacttaatgaattgctggaaagaaaatatggaggatgaaagccggaattctgttttggaattagaaaatgaaacaattgaaaatatagaaaagataatgaaaaattccgagttaaccaaaactgcgaagaaacagaagattttagaggaattaagtggatttagcaaagaatttaaagaattaattgctttaattacaggcggaaaggtatctctggcaaagctgtttgataaaaaagaatatgatacgctggagattgataaaatatgctttgacgaggcttcctttgaagaaaatgaagaaatttatgccaccaatttagatgattattttgaaataattactaaagcaaaagcggtatatgactggatgattttatcaaatatttttaaagatgataaaagtggatatttatcatgtgcaaaggttgcggattatgaaaaacataaaagagatttaaagaatctgaaggaggcgatacgaaatgatagcattggagatgaggaagataaaaggaatttatataagcaaacatttggtgttcctaaaaagggagaagaaaattattcaaaatatattggaatgactgcatcaaagggaagcaagtttgtaatagacggagcaaagtgctcaaaatatgatttttataaatttgtaaaaaagaatatcattccaaagttaaaagatggggaattaaaagaatatattgaaaaagagatttcattagaatcatttatgccaaaaacaagggtaaaagaaaatgccataattccatatcagattcatgctaaggaattaaagaaaatattagaatgtgcggaagcttatatgccatttttaaaagaacgggatgacagcgggaaaacagtaagtgaaaaaatcatgatgttattaaccttccgtgtaccttattatgtcggtccgttaaacactgccagttcccaggcatgggttaaaagaaatggaacaggacgggtaacgccttggaattttgaaaccatgatcaatgtagatctgagtgcagaaaaatttatagaacgaatgacaagtaaatgtacatatttaaaaaatgagaaagtattgccaaaaagctccctagtctatgaagaatatatggtattgaacgaattaaataagttacagataaagtcggaacccataagtgtagagttaaagaatgatatttatcatgatttgtttgagagaaaattaaaagtaactttgaagaaattagtagattatttaaagagagaaaagggttatacggatattacaaaggaagacatcagcggtatcgacattgattttaaatcttctttaaaaagttatcatgcctttaaacgggaatttactgatgttaatctttcagagagtgaaaaggaagatatcatcaaagatatgacgttgtttggcgcagaacccaaacttctaaaaaagcgcttatatgctaaatttccggattatgaaagtcagttaaattcgctgattaaatctttaaattgtaatggatggggaaggctctcttataaattattaaatggaattgcagtggaaatacctggtcagggaatggtaggaactgtattatatcaattaagaaatacaaacaacaatttaatggagattttagagaaaagcgggtctccctatgcaaaattaatagaggaagagaataaaacggatgatagtcataaaataaattatgagttagtcaaagaattgtatgtgtcaccggcaacgaaacgtcagatttggaaagcgattcaggtagtggaagaaatttctcatgccatgggacatccgcccaaaagattatttgttgaaatggcaagagaacatatggaatcaaagcgaagtattacacggaaaaataaattattggatttatataaatccataaaaaatgaaaaagaattgtatgaagaattaaagggacagccggaagataaactgcgaagtgataaactttatttatattatacacagtttggcacttgcgcctataccggtaaaaaaattgaattaagtgaattgtttaataataatttgtatgatattgaccatatttatccccagtcaaaaaccgcagacgatagtttagataatcgtgttttggtttgtaaagattcaaatggatataaatcagatgtatatccaattgacagtgatatacagaaaaaaatgtggaatatatggtatttatggtattcaaaaggtttaatcagtaaagaaaaatataaaagattgacacgaacatcagaattgaccaatgatgagctgacaggatttattaatcggcagttggtagaaacaaggcaaagtaccaaggaaattatgaaattaatgagacagttgctgccggatacggaattggtatattccaaggcaggaaatgtttcaagatttcggcagaaatataaaattttaaaagtaagagaattaaatgattaccatcatgcaagagatgcatatttaaatattgtggttggaaatgcatatcatttaagatttacaaaagatattcgaaactactttatgaaatatggaacttatcggacctataacctgaaaaaaatgtttgaaaaggatataacctttcaggaggaggttgcatggagagctggagagaggggaaccatacagaccgttttaagatttatgaattgtgataaggttctggtaaccagacaaacattcgaaagaaaaggagcattgtttgacgtccagccaaagaaaaagggagaagggcaggttccgattaaaagtggaattaataatgagaggttagctgttattgaaaaatatggaggatacaatggagcaacaatttcttattttactttgatagaaggactgaaaaataataaaaataaaaaacgatatattataccggttccattgtatctgtgtcataaaatagaaaaagatgaattatatgcaaaacagttttttgaaaaagagtctaaattatctaatataagaattattagaaaaatattgattcagacattaatgattgatgaaggatttaaaatgaggctggcagggaaatcaggaacacaactgatttttcataattctaatgaattgtcattaaataaaaaacattttaagtgtttaaaggaaatagaaaaatttattcttgaccgaaaagataagccggatgccacaataaatgagaaaagtgaacttgcaggtaatcaaatgctggatatctataatatatttatagataaattaatgaactcagtctattcgaaagagttaggaaaacatggcgaatttttaaataatggattggagcaattcaataaattatctttagaagatcaggcaatacagctccatgaattattaaagtttttccaatgtacaccagaaatgcctgatttatcaagagtcggaggtagtaaatcgattggtgcgatccggagttccatggatgtaacaaaaagaagcaaattggcaattatacatcaatcggttacaggcatttatgaaaaaatcgaaaggataaacgaatga

SEQ ID NO: 1998 - DNA, 4236 bp, Artificial Sequence
  OMNI-247 DNA sequence
atggcaaaatatcgtataggacttgatgttggtactaattcaattggatgggctgttactgatttaaataataaattaataatgaaaaagggaaagaaactattaggtgttttaatgtttaaagaatctagcggaggagataaagatcctaataaattaagaagaacctatcgttgctctaggcgaagaattagaagaagaaaagaaagacttaattatcttaacgaaatatttgcaccagaaataaataaaattgatccgaccttttttgaaagacttgatgaatcgtttttaaaattagaagatcgcaaatataaagataaatatactttatttattgataaaaattttaatgataagacctactttaaaaaatttaatacgatatatcatctgcaaaaatatttaatggaatcggagaaaaaagaagacattagacttatttatttagcaattagacatttaataaaatatagaggaaattttttaaattcatctaatcctgataattattcttcaaaaattgatgaattagattttttggaaaggctaacaagagtatttgagattataaatagttatgaaatttatagtaaatttaataaacctatattagatattaacgatataaagtctttaattaaagcaaataaagatagtaaaggtattaattcaaagaaggaaaattttataaaaatttttaataaagaagaaaagaaaaataacttgattgatttcgttgcttcattacttgctgggagtagtgttgaactaaataagattctaaaaaaagatgaagatggcccacaaaatagtattaagatttcttttactgatgatttaaccgaaaaatttttagaattaagatcagaatatcctgaatatgatgattttatttcttccatagaagatttatatcgattataccaggctttatatataaataaatacgtacagaatagtttgccacaaacaatggttgaacgatttaatacttacaaaaccgatttaaaattattaaaaggatatataagaaaatattattctacaaaatatgatgaagtttttaatagtattgaaaataaaatgagctacccacatttagtccgacattattgtagcgacattgataaaaaaacgaaagttaatatctccaatgataaaagttttagtagaattgaatttattaattatttaaagaatgaatttagttttgatcaagatgatgaattaaccttgaaattaaaagaaagaattaattcggatgattttctactaactcaaagtgataaaagtaatggtaattttccatatcaattaaattatttcgttttaaagaaaataataattaatcaagaaaaattctattctttttttgatgaaaaagattctaatggatatgttaataaagataaaattatatctttattaacttttaaaatcccatattatattggtccattatcaaataattatgatgaaagtgatgaaaataatcatgcttggattataagaaaaaaagaaggacatattagaccatggaattttgatgaaattgttaatgtagaagatagtgcaaaaaaattcatacaacgtatgcaaaataaatgtacttacttaattaatgaatattgtttaccaaaggattcaataacgtttcaaaaatatttagtttatcaacaattaaatacactatatgttaatggtaagttttattttaatagtgacaataaggatgatttaataattaatttatatagtaaaaatcgtaaaattacgaaaaagttgttacaagattatttatctaataaattaaaagaaaaagttgttataacctataaaaatggcaaagataaagatgttgaaccgaatctacattctttatcttccttatttgactttattaaagtatttggcagttatgaagaagttgataaaaatattgatttaattgaaaatattattcgtgatattgcgatatttgaagataaaagtattttagctagtagattagaaaacgaatataaattaaataaagatcaaattaggataattaaaagttttaattacaataaattttcgagattaagtaaaaaacttcttgatggtataaaaccttttgataaaaatggagttttgattaataaaacaatattaaccatattaaaagattatgatggttcagaaaataaaccagctacattaatggagatattaaatagtaaagattctgaatatgattttgattctgtaattaaaattgaaaatagtaaagaagaagaaaatgagagtgtcgactcttttatagaaaattcttatttgcctaaaatttctaaaagacctactattttaacttgtagaattatagaagaattagctcatgctttaaaagctaatatttcagaagattttgagttttatattgaatgtgctagaactaataaaagtgacaaaaaagcaacaaaaactcgttatgaaaaattaatggaaacacttagtaagagtggcttgaaatctcaagttgattctttaattaatgaattaaaaaaatatgaaaatgataagtctaaattaaatgctgaaagtttatatttatattttatgcaacttggtaaagatatgtatactggtgatcaaattgatttaaatactattattgaaaattatgatgttgatcacattattccacgatcattaataaaaaatgattctttagataataaagttttaacagaaaagaagtttaataatggaaaaagtaatatctatccattatctaaaatagatttatgggaatataatggtggtagaaaaaaagccttagaattttataaaaaacttaaagataataatttaatttcagaaagaaaatatattgccttaacagctaatacagatcttgataatgacacattagaaggctttgctaataagcaactaagtacaaccaatcagtcagtaataggtttgaaagaggtgtttgaagattattatagtattaatagtgaaaacattattttatctaaagccgaaaatgtaagtgattttagaaataattttgatttggttaaatctagaactgctaataattttcatcacgctcaagatgcttatttaaatatttttgttggcagcgcagtaaattcttggattaagaatatttttaaattatggagaattgatgaaagtaatgaacataaatatagtgattttgtttctttcgttagagaaaaaaggtatacattaaatccaattaaaatcatggaaaaatatgttaaagatcaaagtgatgaatttaatgaattaaaagatgttatttataattataagtttattttcacaaagacaagaacatatattaaaaaggatttttttcctaaatcaacagtttatgcggcaaatagttgcgctaatattaatacaaaaaataatttagattgtaaaaaatatggtggttttaaagaatatgcttttggatactacgtcttaataaaaactaaagacaataaattcatattagaaccagtcccatatatatttagtaagaacgcaaatcaatatttagataatttatataagaaaaattatgaaatttatttagataatgtaaaaattaatactaaatttcaaattgaaaaaagacaatttattattactggtaaaacagttaattcttatctcgttcgaaattctatagaaagattttttccatatgatttaattaaaattattaaaaaagtcgataattttatgaattttttaaaacttaataaaattgctattaatgtaaaaaatcaggaatcaattaataaagctattgatgatttaaataatttacataaaataaaagacaaaaataatgaattaatatctaaagaaaataaatttggtgaaatcgaaactctaacttctaatgaattaattaatgtttttgattacttatttactttgtatagtaaagatgcattttcgtattcattctctaaagctttaatatatgaacaagaagaactaaaaaataaatttatgaatttagatattttacttaaaacttatacaattagtgagatgttaaactatttaaaaactaatgaaagaaaaaaaataaatttaataaagcttgataaagaggaaaattgtggaaagcttactcagaataaagttttgcctttaggcactaagataatttttgaatcaaacacaggattatataaaaaggaaattattttaaaataa

SEQ ID NO: 1999 - DNA, 4236 bp, Artificial Sequence
  OMNI-250 DNA sequence
atggcaaaatatcgtataggacttgatgttggtactaattcaattggatgggctgttactgatttaaataataaattaataatgaaaaagggaaagaaactattaggtgttttaatgtttaaagaatctagcggaggagataaagatcctaataaattaagaagaacctatcgttgctctaggcgaagaattagaagaagaaaagaaagacttaattatcttaacgaaatatttgcaccagaaataaataaaattgatccgaccttttttgaaagacttgatgaatcgtttttaaaattagaagatcgcaaatataaagataaatatactttatttattgataaaaattttaatgataagacctactttaaaaaatttaatacgatatatcatctgcaaaaatatttaatggaatcggagaaaaaagaagacattagacttatttatttagcaattagacatttaataaaatatagaggaaattttttaaattcatctaatcctgataattattcttcaaaaattgatgaattagattttttggaaaggctaacaagagtatttgagattataaatagttatgaaatttatagtaaatttaataaacctatattagatattaacgatataaagtctttaattaaagcaaataaagatagtaaaggtattaattcaaagaaggaaaattttataaaaatttttaataaagaagaaaagaaaaataacttgattgatttcgttgcttcattacttgctgggagtagtgttgaactaaataagattctaaaaaaagatgaagatggcccacaaaatagtattaagatttcttttactgatgatttaaccgaaaaatttttagaattaagatcagaatatcctgaatatgatgattttatttcttccatagaagatttatatcgattataccaggctttatatataaataaatacgtacagaatagtttgccacaaacaatggttgaacgatttaatacttacaaaaccgatttaaaattattaaaaggatatataagaaaatattattctacaaaatatgatgaagtttttaatagtattgaaaataaaatgagctacccacatttagtccgacattattgtagcgacattgataaaaaaacgaaagttaatatctccaatgataaaagttttagtagaattgaatttattaattatttaaagaatgaatttagttttgatcaagatgatgaattaaccttgaaattaaaagaaagaattaattcggatgattttctactaactcaaagtgataaaagtaatggtaattttccatatcaattaaattatttcgttttaaagaaaataataattaatcaagaaaaattctattctttttttgatgaaaaagattctaatggatatgttaataaagataaaattatatctttattaacttttaaaatcccatattatattggtccattatcaaataattatgatgaaagtgatgaaaataatcatgcttggattataagaaaaaaagaaggacatattagaccatggaattttgatgaaattgttaatgtagaagatagtgcaaaaaaattcatacaacgtatgcaaaataaatgtacttacttaattaatgaatattgtttaccaaaggattcaataacgtttcaaaaatatttagtttatcaacaattaaatacactatatgttaatggtaagttttattttaatagtgacaataaggatgatttaataattaatttatatagtaaaaatcgtaaaattacgaaaaagttgttacaagattatttatctaataaattaaaagaaaaagttgttataacctataaaaatggcaaagataaagatgttgaaccgaatctacattctttatcttccttatttgactttattaaagtatttggcagttatgaagaagttgataaaaatattgatttaattgaaaatattattcgtgatattgcgatatttgaagataaaagtattttagctagtagattagaaaacgaatataaattaaataaagatcaaattaggataattaaaagttttaattacaataaattttcgagattaagtaaaaaacttcttgatggtataaaaccttttgataaaaatggagttttgattaataaaacaatattaaccatattaaaagattatgatggttcagaaaataaaccagctacattaatggagatattaaatagtaaagattctgaatatgattttgattctgtaattaaaattgaaaatagtaaagaagaagaaaatgagagtgtcgactcttttatagaaaattcttatttgcctaaaatttctaaaagacctactattttaacttgtagaattatagaagaattagctcatgctttaaaagctaatatttcagaagattttgagttttatattgaatgtgctagaactaataaaagtgacaaaaaagcaacaaaaactcgttatgaaaaattaatggaaacacttagtaagagtggcttgaaatctcaagttgattctttaattaatgaattaaaaaaatatgaaaatgataagtctaaattaaatgctgaaagtttatatttatattttatgcaacttggtaaagatatgtatactggtgatcaaattgatttaaatactattattgaaaattatgatgttgatcacattattccacgatcattaataaaaaatgattctttagataataaagttttaacagaaaagaagtttaataatggaaaaagtaatatctatccattatctaaaatagatttatgggaatataatggtggtagaaaaaaagccttagaattttataaaaaacttaaagataataatttaatttcagaaagaaaatatattgccttaacagctaatacagatcttgataatgacacattagaaggctttgctaataagcaactaagtacaaccaatcagtcagtaataggtttgaaagaggtgtttgaagattattatagtattaatagtgaaaacattattttatctaaagccgaaaatgtaagtgattttagaaataattttgatttggttaaatctagaactgctaataattttcatcacgctcatgatgcttatttaaatatttttgttggcagcgcagtaaattcttggattaagaatatttttaaattatggagaattgatgaaagtaatgaacataaatatagtgattttgtttctttcgttagagaaaaaaggtatacattaaatccaattaaaatcatggaaaaatatgttaaagatcaaagtgatgaatttaatgaattaaaagatgttatttataattataagtttattttcacaaagacaagaacatatattaaaaaggatttttttcctaaatcaacagtttatgcggcaaatagttgcgctaatattaatacaaaaaataatttagattgtaaaaaatatggtggttttaaagaatatgcttttggatactacgtcttaataaaaactaaagacaataaattcatattagaaccagtcccatatatatttagtaagaacgcaaatcaatatttagataatttatataagaaaaattatgaaatttatttagataatgtaaaaattaatactaaatttcaaattgaaaaaagacaatttattattactggtaaaacagttaattcttatctcgttcgaaattctatagaaagattttttccatatgatttaattaaaattattaaaaaagtcgataattttatgaattttttaaaacttaataaaattgctattaatgtaaaaaatcaggaatcaattaataaagctattgatgatttaaataatttacataaaataaaagacaaaaataatgaattaatatctaaagaaaataaatttggtgaaatcgaaactctaacttctaatgaattaattaatgtttttgattacttatttactttgtatagtaaagatgcattttcgtattcattctctaaagctttaatatatgaacaagaagaactaaaaaataaatttatgaatttagatattttacttaaaacttatacaattagtgagatgttaaactatttaaaaactaatgaaagaaaaaaaataaatttaataaagcttgataaagaggaaaattgtggaaagcttactcagaataaagttttgcctttaggcactaagataatttttgaatcaaacacaggattatataaaaaggaaattattttaaaataa

SEQ ID NO: 2000 - DNA, 2997 bp, Artificial Sequence
  OMNI-266 DNA sequence
atgaaaagacgcgtttttggctttgatttgggcatagcatccataggctgggcagtcgtagagtttgataatgaatattatgatatggaaacgggagaaattttagctgacaaggtcaatggaagcggagaaattgcgcagggaacaatagttggctgtggagtgcggacttttcctgtggctgaaaaccctaaagacgggagttcattggcagctgcacgacgggaaaaacgtttagcgcgcagggcttgtcggcgtaaggctcgtcgcaaaaaaggcttgcagggcttgtttgctgcaaaaggtttggctgaaagccctgctgcatttactgatgaaatttgtatgcggcaaatcggcggtgatgtttggaatttacgggtgaaagcgttacaggaaaagctttccaaagaagaattagcgcgagttttatatcatttagcaaatcatcgcggatttaagtccgtccgtaaagcgcaggaagaaaacgataaagacagcggcaaggttttgtctgctattcgtgcgaatatggcattaaaggaagacggcaaaagtctggcgcaaattattgtggaaaaagccggtgaaacaggtaaaaaacgtaatttttcaaaggttgttaaagttaataaaaaaggtgaagatgtaaaagaagctgattatagaaattccattccgcgcagtgaaattgaagcagaacttgccatgatttttaccaagcaaaaggaatatggtatttttacacaagatttatatgatgattttgtaaaaattgcttttcgccagcgcggcataaaaagcgttggggatatggtgggaaattgtacttttgaaaaagacgaaaaaagatctcccaaagaagcgccgacagctgaattttttgtcgcatggagtaaaatcaataatcttgctgtgtatgagggagataaaaagcgtgagttaaccccagaagaacggcagactttatttgatgtattgaaagtaacaaaagacataaaatataagacaatcaggtcaaaggtatttaaaggaaaagatattcaatttacttgcttaaattattcgccaaaacagaaaaaaaataaaaacggtgaactggtaacgattgatccagaagatgtgcttttttataatatgaaaggctggcataagctgcaatcaatatttaaagctgagtacagcgatatttttaatgatattaaaaaattagataaggctgtcacgataattgctacagaaaaagaagatgtaaaaattcaagaaaagttgcaggaacttggctattcacaagaaaaaattgataaatttttgactttgtctttcgataaatttatcaatttatccttgaaagctttgtataaaatcaatccgtatcttgaaaagggcgaaaaatatgacaaggcttgtgcaaatgcaggctatgattttaaagaaataacagataaactcgttaacgaaaaaggcttgctgcttgctgttattgataaggaaaaactaacgaaagttcctgtagtcaatagaaccattgcccaattcagaaagttatataatgcaatggtgcgtcaatatggtgcgcctgatcaaataaatattgaaacaggcagagatctgaaaaagagtgcagaggaacgcaaaaaaattcaaaagcttcaagaagaaaacagggataaaaatcaaagcataaaaaaacaattattggaatggggtgttaaagataatggaacgaatattacaaagcttcgtttatataatgaacagcaaggaaagagtatctatagtggaaatgaaataaaaattgaacagttgtttgatgatgggtatgttgaaattgaccatattctgccgtattcacgcagctggaataattcccaaagcaataaagtgcttgttttagcccgtgaaaatcaagaaaaaggcaatcaaacaccttttgagtacataggaaagagtgatgcaaaaagcaaggaatggactgattttaccagctatgtaacaagttttgcaagcatagaaaagcataaaaaagaaaagctgctgctggaaacctttaatgaaagagaacaggagttcagggatagaaatgctaatgataacagctatattgcactgtatgtaaaacgttatctggaagacggcatcgattttggcaaaagtttgcatacggaaattaaaaataaagtgcaggtgcgcagcggtaatgtgacggcatttttgcgccgtcagtggggcttggaaaaagacaggacggaaagtgataaacaccatgcgcaggacgcaatcgtaatagcctgtgcagcgcaaggcatggtgcaggctctctcaaaaatttcccgtaaagagggggtagtgcatactgatgctgtgcatagaaaatatgctatagctaagccgtgggataattttagaaatgatgtgttgacagctttggaaaaggtttttgtttcccgttcaccacggaaaaaagcaagcggggaaatccacagtgagacaatttataccttgaatgaaaagaaaaaacagtttgaagcaaaaaatgcaaaatccggtttttatgttcgcggcggcatagcaggaaatggcgatatgcttcggactgatgttttttgtaagaaaaataaaaaaggcaaagtgcaattttatcttgttcccatttataaaagtaatttgggtaaagaattaccgaataaagctattgtcgctaataaaaatgaagatgaatggacagtcattgatgaaagtttttcttttatgttttccttatttttggatgacttaataaaagcacaaaaagatgaaacggttacttttggatattataagggcgtagacagggcaaatgctgcaataacaatagaagtacatgatagaagtcaggataatgccagaattggcacgaaaacacttgatagtattaagaaatatcaggtcaatttattaggtgaatattttgaggtaggaggagaaaaaagacaactgttaacgcatgaagaataa

SEQ ID NO: 2001 - DNA, 3051 bp, Artificial Sequence
  OMNI-269 DNA sequence
atgaaaaagattctaagtctggatattgggataagttctatcggaaatgctgttgtcgaacttgatgatgaaaatttttacgggaaaatacttgatgccggagttagaattttttcagcagcagaacaaccatctggagattctttagcagccccaagaagagaagcgagaggagcaagaagaagaatttcaagacgttcaagccgtttatataatataaaaaaatatttaatcttaaataactttataactcaagaacaaattgaaaatttatattgttcaaataaacaaattaaagatgtttggactttgagaaaagaagcactatatcgtaaactgaataatgaagaattttatagaattcttatgcatattgcaaaaagaagaggtttcaaatcaataagaaaatcagaagaagcaaaaaaagaaggcgacttattaaaagcaataaaacaaaattatcaggaatttgaaaacgggcagtataaaacaatcggagagatgtttgcagaaaaggatataaaaagaaataaaagagaaaaatataataattccattccaagagatcttttgcaaaaagaaattgaaataatctttgaaacccagagaaaactcgggtctccacttgcaaaagaagaaacagaaaatttctatctacaaacagctttttatcaaagaccactgcaatcaatggaagataaaataggatattgttcattcgaacctgatgaaaaaagagctccaaaatgtgcatatacttcagaaatttttacagcggcaacaaaacttgtaaatctgtctataactgatgaattaggagaatgtagagtcctttgcggagatgaaattaaacaaattatagagcttgctcacaaaaacacaaaagttacatacaaacaactgaagaaagaattatgtttggaagataatattttatttaacggactaaattacaacaaaaaagacaaaaaccctgaagactcaacattaattgaattaaaaaattatcacttaataaaaaaatcaatagtaaatgataaaaatttaggaaaagtgtactttgaggcaataaaatatgataaggacctgttcaataatattgctactgttttaacctgtgaaaaaagtgatgagtcagtaattgccagaatgaaagaatattttattgatgataaaattatcgcttgcgtaaaagacttatctatgagcaaaactatgcatctttcgctgaaagcgatggaaaaaatattaccctatatgctcgaaggatataagtataatgaagcctgcgaactggctggttacaatcatcattcgatttcaaaaaataaaacaaaacaaaatttcttgcctgttttacctcaagaagaactgacaaccaatcctgtagtaaatcgagcaatttctcaaaccagaaaagttgtcaactcattgataaaaagacatgggacgtttgattatattattatcgaaatggcgagagatttatcaaaatcatttgatgaacgaagaaaaataaaaaaagctcaagaagattttcaaaatcaaaaagaactggcaagaaaaagatgtatagaaaatggattaaatccagattatccaaagagtaatttattaaaattcagactatgggaagaacaaggaggatattgtatttattctggaaaatacattgacccgagaaaacttagcgaccaggattatacagatgtagatcatattattccatattcaaaaagttttgatgacagcctgaacaataaagttttatgcctgtctgatgaaaacagacaaaaaggaaataaaatcccatatgaatatatcggagaatcaaaatggtatgacttcgttcaaagaataaaaacctataatttaaaatcagcaaaatacaacagactcatcagaaaaagttatgaatcagaaggatttaaatcacgcaacttaaatgatacaagatatataacaaaattcattaaagactacataaaagaaaatcttgattttggaaataatcttaaagttgaaactcgaaatggttcactgacagcatttttaagaacacaatggggactgattaaaaacagagaagaaaatgacagacatcacgcccttgatgcaattgtcttagcgtgctcaacacaaggcatggtacaatatttatcaactgtctctgccaaaattgaaaactacaactatacaaaagataaaaaaccaagatttaaacgtccctgggctacctttaaagaagatgtagaacttgctatctccaaaattttcgtttcaagagctcttagagcctctgtctcaggacaattacatgatgcaacaataagaagccctaaacaccttcaagatgggttcactgtactaaaaacacctcttgaaaaaattaatctgcaaacactagaaaaaatgtatgacaaagaaagaaacataaaaatatacaacctccttaaagaacgtctgacaaaattcaataacgacccgaaaaaagcttttgaagagcctgtatatatgcctatgtcagaagaaaaattgaaacaaggacaaaaacctcaccttataaaaacaataaaaattaaagacaacagtatatcaggaataaaagtgcataacggtttcgcacaaaatacatcaatgcccagagttgatgtattcacaaagaaaaataaaaaaggtaaaaacgaatatttccttgttcctatctacatcgctgattttggtggagagctgccgaacaaagctatatcaacaggaaaaaaccgttggatagaaataactgatgactacacattctgctttagcctatatccaaatacattgattgcaatcaatccaaccggcaaacctgaagatgagttcctcggttattacaaaggctgtgatattacaaccggaacaataaaattagattctcatgacagaacaataaaagataaacgtatctcaacaaaaacagcagcgtatataaaaaaatatcaggtcggagttttgggggattatcatgaagtgaaacatgaaaaaagactcaaactcaaaggaccaaaataa

SEQ ID NO: 2002 - DNA, 3096 bp, Artificial Sequence
  OMNI-274 DNA sequence
atggttaaaatattgggtcttgatattggtatttcatcagtcgggtattccgtaattgaattggacgaaaataaatttaacggcaaatttctggcattaggtgcaaggatatttactgcagcagaacagcctaaaacaggcgcctcacttgctgcaccaagaagagaggcaagaagcgcaagaaggaggttgtccagacgaagctgccgcctgtataacataagaagattattattagaaaaacaatttattacacagacagaaattgccgaaatctatgatacacacgaacaattaacagatgtctgggatttaagaaaagaagctctaaacagaaaacttgataataaagagctgtatagaatacttatgcatattgcaaaacgcagaggttttaagtctgttagaaaatccgaagaagcaaaaagggaaggtgaattattaaaatctatagcagaaacaacggaagaatttaaacaaggcaaatacagaaccattggtgaaatgtttgcacttaaatatacaaatggcgaggcaaaacgcaataaatccggcaattacaacaaatccattgcaagagatttactaaggcaagaaattgaaataatatttgaaatgcagcgcaaactgggctcaacaatcgcaaataatgaaatcgaaaaaggctataaagagatagctttttatcaacggcccctgaaaaccatcgagataaaaacaccctgtccttttgagccggaagaaaaaagagcaccgaaatgtgcttatacatcggaaaaatttagcgccttaaacaaacttgtgaacctgcgcttaataaacgatttgggcgataccagatttttagcttccgcagaaataaaagatgcagtccgattggcaaataaactatcaaaagtaacatataaacaattgcgaaaagaactatatctggacgatgagatcaggtttttaaacttaaattacacaaaaacagactccaagggtcaacaagtcgacccggaaacggcagtattgattgaattcaaaaactatcactcaattagaaaagcactggagtgcaatggaaatttagggaaaatatatttcgattccataaaagatgatgaagacttttttgacaacatagcttatgtattaacctgtgaaaaaacagatgaaagcattgaagaaaagctgaaagaatacggctatagcgcaggagttatagatagcataaaagagctttctatgagtaaaacttcccatctttcgctaaaagcaatgaaaaaactgattccatatatgctggacggtaaaaaatatacagaagcctgcgaacttgccggttacaaaaccgaaaatcaaaatacggcaaagcagtcattactgcccgaactcagccaggaagagcttactgtaaacccggttgtaaacagggcaatttctcaaaccagaaaggtcgttaatgctttaatcaaaaaatatggaatactggattcaatcattatagaaatgtcaagagatttatcaaaaacagcgacagaaagacgcaatattcaaaaattacaggaagaatttaaatcagaaaaagaaaaggcgcgccagagatgtcttgaaaacggattaaaccctgattttcccaaaagcaatttattaaagttcagactatgggaagaacagggtggtttctgtgtatattcaggcaaacatattgaccctaaaagactgtccgagcaggattatgttgatattgaccatattattccgtattcaagaagctttgacgacagtttaaataacaaagttctttgtctgactgatgaaaacaggcaaaagagcaataaaataccttatgaatatattggtgaagataaatggtatgattttgtacagcgtgtaaaatcttaccatctaaagcaaccaaaggttaatcgcttaactaagaaaaaatacgaacaagagggatttaaatcaagaaatttaaacgatacaagatatattgccaaatttgtcaaagactatataaaagaaaatcttgattttggcaataatttaaaggtagaaacaagaaacggctcacttaccgcttttttgcgtaatcaatggggacttataaaaaacagagatgaaagcgacaaacatcatgcgcaggatgcagcagtaattgcctgttctacacagggaatggttaaatttttgtccacagtttcggcaaaacttgaaaattatgattattcaaaagataaaaaaccccgtttcaaaagaccctgggaaactttcaatcaggatttagagtacgaactgagccgcgtttttgtctcaagagcagcaaaaaagtctttcaggggcgaacttcatgatgcaaccataagaagtgtaaagcaccttgacaaaggctttactaccgtgaagaaacctattgagcagattgatttaaaaacattagagcaaatgtttgataaagaaagaaactataaaatatacaatctcttaaaagaaagactggagcagaataacaataatcctcaaaaagcttttcaagagccggtatatatgccgctttcaaaagaaaaagaagcaaaaggacaaaagccccacagaataaaatccataaaaataaaagacactggtacatcaggcgttcttgtaagaggcggtcttgccaaaaatgcctctatgccgagagtggatgtttttactaaaaagaataaaaaaggtaaaaacgaatattttcttgttccgatatatgtatctgattttggaaaagaactgccaaataaagctattacaagcaaaaaagactgctggctggagataaacgatgaatacacattctgtttcagcttatttccggatactcttattgctattaatccgacaggcaaacctgaagatgagtttttagggtattacaaaaaatgtaatatcagcaacggtgcaataatccttgattctcatgacagaagcattaaagaaaaaggctttggttcaaaaaaacttgtatacataaaaaaatatcaggttgacatactgggcgattaccatgaagtaaaacaagaaaaaagacttggaataaaaccaaaacaaaaaggtcaacaaaaagatggggtataa

SEQ ID NO: 2003 - DNA, 3165 bp, Artificial Sequence
  OMNI-281 DNA sequence
ttgacgaattatactttaggtttagacatcggtatcacctctgtaggttatggtcttattgatacagatacgaagtcagttattgatgctggtgttagattgtttccagaagcaaatgtagagaacaatgaaggtcgtagatcacaacgtggtgctagacgtttaaaacgacgtcgtattcaccgacttgaaagagtcaaacgtttgttgtcaaactatcatctaatggaagaatcaaatcctcctcacagcacgaatccatatcaaattcgagtaaaaggtcttagagaagaattaagtaaagctgagttagctgtagcgttactgcatatagctaaacgacgtggaatagacaatatgagtgtggatgccgaagatgacgcaccaagtgatggtgtctcaactaaagatgtgctagctaaaaatgcaaatgagctcagtcacaagtatgtttgtgaattacaactagatcgacttttagctgaaggtaaagtaagaggcgaacagaatagatttcaaactaaagatttaatagaagaagtgaaacaacttctcactactcaaaaaaattatcatacgttcgatgatgaatttattaatcattatattaaattagtacaacaacgaagagcttattatgaaggcccaggcgaaccaagtccttatggatggggcggcaatctcaaagagtggtatgagatgctaatgggtcactgtacatattttcctgatgaattacgtagcgtaaagtatgcatattcagctgatttatttaatgcattaaatgatttaaataatcttgttattcaacgggatggcgttccttacttagagtattttgaaaaattccacattatcgaaaatgtttttaaacagaaaaagacacctactttgaaacaaatagctaaggagattgatgtcacacctgaggatatcaaaggttatcgagttacaaagtctggtaagtctgagttcactaaatttaaaatatatcatgatttgaaagatattctcacacataaagagtatcttgaagataacgatttaatggatgaaatagcgaagatattaactatttatcaagattcagaaagcattaaagaagaactagaaaagttgacggaattatttactgaagaagaaaaagaagcgattagtcaattatcgagctacacagggacacatcgtttatcacttaaatgtataaattatgtccttccagatttatggaaaacgccatataaccagatggagttattcactcaattaaatttgaagcctaaaaaagtggaattgaagaatcagaatcacattcctacagaaattgtagatgaatttatactctcacctgtagttagaagatcatttattcaatctattaaggtagttgatgcagtaattcaaaaatatggtcaacctacggatataattattgaattagcgcgagaaaataacagtaaggaacaacgtcaatttattaataaacttcaaaagcaacatgatcaaacacgacaccgtattgaagaaattatgaaacaatacaataatgagaatgcgaaatatttatttgaaaagattaaattgcatgatatgcaagaaggtaaatgtctttattctctaaaagatattcctttagaagatttattgcgtaatccatatcattatgaagttgatcacattattccacgatcagtagcattcgataattcacttaataataaagtgttagttagacaggaggaaaatagtaaaaaaggtgctcgtactccatatcaatatttaaattctagtgacgcagttatttcatataatcagtttaaacaacatgtactgaatctaagtaagtcaaaagatagaatgtctaagaagaaacgagattatctactcgaagagagagatattaataaattcgaagttcaaaaagagtttataaaccgaaatttagtggatacccgttatactacgcgagaattagcgaatttcttaaaaacttattttaaaataaataacattgatactaaagttaagacaatcaacggtggtttcactaattatttacgtaaggtgtggagatttagtaaagaaagaaatcatgggtataaacatcacgctgaagatgcattagtcatagcaaatgcgaacttcttatttaaacaacataaagcactcaaggaagctgaaaaagtgttaaacaatccagcaagtaaagatgaaagtgctatagatgtatttaatgataatcagtataaagaattaatggctaaaaatagcgtcgtagatgaaattaaagactttaaagatttcaaattctcacatcgagtggacaagaaaccgaaccgtcaattattaaatgataccctctattctacacggaatattgataatcatgattatatagttcagaagttaactaacatttatgataaagataataaagaagttaagaaaatcgtaagcgaaaagccagaaaagttactaatgtatcaacatgatccgaaaacttttaaaaagttacagacagttatggatcaatatgctgaagaaaagaatccattagctaaatattacgaagaacatggtgaatacttgaagaagtacgctaaaaaaggtaatggaccagcaattaagagcctgaagtatatcggtaaaaaagtgaatgcgcattttgatgttacagataagtatccaaatcctaaaaataaattagttaaactttcattgaaatcatttaggttcgatatttataagggagaatctggatataagatgttaggcttatcctatttagatgtagaaaagaaagacgcgtattatcgcataccatctgagtattacgaagagcttaagaaaaagaaaaaaataaatgaaggcgacgaatttattggtagtttctatacaaatgatttaataaaggttaatggcgaaaagtatagagtgattggtgttaataatagtgatagaaatattattgaagtagatatgccagatattcgatacagagagtacttagaactaaataataaaaaaggtacaccacgcatttttattactataggtaaaaagattaatactatcgaaaagtattccacagatatcctaggtaatttatataaaaatgaacgccctaaaaaaccacaactaatcttcaaaaagggtgtagagtaa

SEQ ID NO: 2004 - DNA, 3243 bp, Artificial Sequence
  OMNI-293 DNA sequence
atgaagtatggagttgggttggattgcggtatcgcatctgttgggtattgcgtaacggagcttgattttaacgacgagccgagaagaataattcgtttgggctcgcgtatttttgacaaagccgaaaatccgaaagacggaagttcacttgcgcaaccgaggagagagaaaaggggacttcgtcgccgaatcaggcggcatcagcacaggcttgaacgcataagatatatgcttgttcaagaaaacatagtttctcaagcagagcttgacactatgttcaaaggtaaactttccaatatatacgaaatacgcacaagagcacttgacgaacctgtttctaatattgagtttgcaagagttcttattaaccttgctcaaagacgaggctttaaatcaaacagaaaagttgatgaggaaacctcggataaagaaaccggtaagttattgggagcaattgaaaacaataaagaaaatattattcaaaacggctatcgtacagtcggtgaaatgctgtttaaagatgagcggtattcaaaatataagcgtaacaagggcgaggattaccttaacactgtgtcccgtgatatgattgccgatgaaataaaggcgatttttgcttcacaacgcagttttggtatgccgtttgcaaatgaaaatacagaacacgaatatacggatattgttatgtcgcaaagaccgtttgatttgggacccggtgagggcaacgaaaaatcgccgagtccgtatgccggtaatcaaattgaaaaaatggtaggtcgctgtactttctttcctaaagaaaaaagagcggcaaaggcaacatattcatttcaattgttttcacttttgcaagggataaataatattactttagttgacggaaattcaaataaatatccgttgtcggcgcaggagcgcagaatacttaaggaatattgtttcaatacggcaaatgtgacatatgcttcaatcagaaagaaattggggatttcaaccgattacagatttaacaacatatcatatggcgaaaacggaatagaggagtccgaaaaaaagacaaaatttcagcatcttaaaaattatcaccaaatgaaaaagattttgggtgattcgataaatgcattttcacatgatgagcttgatgaaataggcagaatctttacatattacaaaaatgattcaaaaattattgaaaacttgaaggaagcagggatagatgaatcaatgtacccttcattgttaaagctcccttcattcagtaaaatgggtcatataagtgttaaagcgtgtaaaatgcttattccgtttttggatgaaggcaaaacatataatgaggcttgcgagtctgcaggtatagattttaaagcgcacagcatggcaacaaagcaaatgtatttaccgcctaagtccgatgaacttgaagatattgtcaatcctgttgtaaagcgtgccgtgtcacaaacaattaaggttataaattcaataataagagagatgggaaattctcctacatatatcaatatcgagcttgctcgtgacctttccaaatctaaaaaagaaagagatttgattgataaaaaatatcaaacaaacagggcggcaaacgagcaaatcaaaaaagaaattgccgataatttcggttttgaggcaaaaggtcaggatattattaagctcaaactttggcatgagcaggatggtatttgcccatatacacttaaacctattgaatacggcaagctgttcaatgataaaggatatgtcgatatagaccatattgttccgtacagtgcatgttttgatgacagctataacaataagatattgacattttcgcgtgaaaacaggcaaaaaagcaaccgccttccacttgaatatttggatgaaagtcaaaaatcaaaatatcgcgtttgggttaacaataatattaagaattatcgaaaaaaacaaaatttgttaaaagaatgcttgactgaaaatgataaaaaagagtttaaatcaaggaatttgaatgatacaagatatttgagcaaggttctttataactatattaacgataatttgttgtttgatgaattttatgatgacagaaagcgtcatgtcgtttcggtaaacggtgccgttactgcctatatgcgaaaacgctggggtattgacaaagtacgcgaaaacggcgatttgcatcacgctgtagacgccgcagtaatttcttgtgtaacacagggaatgattaatcaaatttcaaagtattcttttgacaaagaaactgaatttgatgttgacactcgcacgggagaagttcttgagcagtttccttttccgtatagggaatttagaaaagaacttgaggcaagaagtgaaatcgaagacgaaaaaaggcttaaaaatgtactgttgtcattgcctaattacagctatgatgatgttgaggttgcaaaaccggcgtttgtttcccgtatgcctcgccataaggtaaccggtgaagctcatgaagctactatccgttcgggcaaggttgagggatatacaatatcaaaaatcccgttaacaaaactcaaactgaaaaacgggggaattgataaatattataaacccgagagcgacacattgctttataatgcattattgcaaagacttgaggagtttaacggaaatgctgaaaaggcttttgccgaggagtttcataagcccaagtcagacggcactccgggaccggttgtaaaaaaggttaaaataattgaaaaatcgtcatcgaatgttaaagcaagaaatgagaataaattgggcgttgcggataacggctcaatggtccgtattgatgtgttttatgttgacggtgaaggatattattttgtgccgatttatgtttccgatacggtaaaaccgaccttgcctaatcgggcttgttctcgtggaaaatcaggttggaaggaaatggatgacaaggattttgtattttcgctctattccaacgatttaatcaggataacagctaaaaaagatatgaaattcagccttgttaataaagacagtactttgccgtcaaataaattttcaaacggggaattggtatattatattacggcagatatatctacagcgagtattactgtagaaactcatgacggagcatatgcatttaaaggctgcggtataaaaacattgacaaatattgagaaatataccgttgacccgctcggcaatgccagcaaggtgaaaaaagaaaaacgaatgtattttaaataa

SEQ ID NO: 2005 - DNA, 3246 bp, Artificial Sequence
  OMNI-295 DNA sequence
atgaaaatcataggacttgacataggtattcgctcgataggttgggctttacaagaagatggagaaatcatagctaagggcattcgcataccacgaagtgttgaagacgcccaaacaaaagaatcccttgcagcgcataggggagcagcaaggcgcattcgtagaactttatatcggcgcaaggcaaggttaagtcttttaaaacgcttgatttgtaatgaatttggcttaaatttagctgattatcacgccaaagacggcgacttaccaaaggcttttgttgcagatgaaaacaccaaaagcccttatgaacttcgtgtcaaagcattagaacacaagttgaatgccgatgagtttgcaagagtgattttacacattgccaaacacagaggctatggcaacaaacacgctagaaaagaaagcgataaagacaaaggagcggttttaagtgccttaaaaaacaacgaaaaggctttaacggcttataaaagtgtaggcgaatacctctacaaagagttttaccaaaaagggcgtttcattactaccaaagatgaaaacggcaaagaggttttggagcgtgatgaagcacattttggcaaagttcgcaatacaactgatgtttatgagcaatgtatgagacaagaatggctacaagctgaattagaacttatttttgaaaaacagcgtgaattgggttttaaattcagcgatgaatttaaaaataaggttttagaaatagcgtttttccaacgcccactcaaagacacagacgacaaagtcggcttttgcacattttttcctgatgaaaaaagagctccaaaggatagtttaagtgccatagagtatgtcgcacttggcaaaatcatcaatgagctaaaatatattgagaaaaaatggaaaaaagaaacaggcgaagagttaaaaggtaaaatttgcgctccacaaaatatcaatgatattttaaagattgtcattgaaaaaggcgaaatcagctacaaagaatttcgctcaatccttaaacttgatgaaagagttaaaattttttcaaaaaatgtcaaacttgattacactcaaaaaaccattgatgaagccgaaaaagctaaatttttggagttaaaagcaactaaggacaatctaaacattccaaatttaaaaggttttcaaaatgccttaaaaggaagttttgaaaaatttgacagaaaaacacttgatgatatagcttttgatttagcgacaatcaacgacaaagaaaagctattcaaagaacttgacaaatatgatttaagcgcagagcaaaaagaagccctatcaaatctttctttttcaaaattccttaatctcagctacaaggctttaaatgagattatccctttgatgaaagatggtttgcgctatgatgaagctgtggaaaaactaggctttaaaccaagtgatgagtatgattatgataaagtgcaaaaagaacttcacaatcctgttgtttctcatatccttgccgaagtggttaaggttttaaaggctattttaaaaaaacacgggcaagtgcataaaatcaacatagaatttacccgtgaagcaggtataagcaaagaaaaacgcaataagctagaaaacaaacaaaaatcaaactttcaagctaatgaaaaagctaaggaaatgtgtaatactcttggcattgtggcaagtcataaaaatatacttaaaatcaagctttggaaagaacaaggtggagcttgtgtatatagttgcaataatggtaaaggcaagacaattaccgaaaaggatttgcaagatgaaactacgctccaaattgaccacatttatccgtattcaagaagttttgatgatagttatagcaacaaagtccttgtttttacagaacaaaatcaaataaaaagagaaagaacgccatttgaagcctttggtagcaatacaaacaaatggaataacattgtttcttttgtaaatgggtgtaaaactatgtcagaatctaaaaagaaaaggattcttaacactgaatttaaagaaagggagcagggatttatccaaagaaatttagtggatacaagctatatagctaatgttgtaagggattatattgacaaaaatgttaaattcttgccccttgatgaaaaagaattagcacaaagcactatgttctttgagttagatagctataatgaaaaagacgattcaaagaaagcatacaaacgcaaacacatagaaatcattagtggtaacctaacttctatgatgaagcattattggggacttcattttttagataagaaaaatgaatttggcgaatatgaaaaggatagaaatcatcacttgcaccacgcattagatgctatcatcatttcatatatgaatgcaagtagagtaaaggcttttgctgattttaaaaagaatttagaaacgatgaaagcaagtgaatatgctgaaaagttgagcgaaatagagaaagagcaaaaacgcactaaaagaaagaaaagcacatttgaagtgccgtctaactatgctaaccgcgatgaatttgaaagaaaaatcaaagaacaaatctttggcatttttgtttctcaaccaccaaataaaaaggcaagaggtgctttgcatttggatagcttttactcacaaagtgatacaagtgtcataagcagtaaggatactatggaaaatgcgctcgaactaggcaaagtgcgtaaaattggcacaaaaatcgttagcaatgcaagtatggtgcgtttagacatctttaaacgcaagaaagatgacaaattctttggtgtgccgatttatactatggactttgcaaagggagttttgccaaataaagcagttggctcaaaagaatggatagaaatggattcaaattatgaatttttgtttagcattttttcaaatgatttgctttatgtaaagaaaaagggtatggaaaaggctgagttgtgttattatgtgaaatttgatattggcggtgggcaaatttcgttcaaatcgcacgacaatagattaaaatcgcttacggaaaatcaaatcaaactttatggcacaaaagaccctaccgaagaaagagtgcgaggtagagtgggcattcaaaatttagaaatctttgaaaaatggcaagtctctccgcttggtgaagtcaaaaaggctgaatttaaagagcgtgagcctatcgcattgaaatccactcccaaaaattcaaagctagacaagctaaattcaaaaacggagcgaaaatga

SEQ ID NO: 2006 - DNA, 3294 bp, Artificial Sequence
  OMNI-308 DNA sequence
atggcttacgcaattggtttagacataggtattgcttctgtgggttatgcagtagttgcacttgattatgaagaaaatccatggggtatcatcaatatgggttctaggatttttgatgctgctgaaaatcctaaagatggggcttcgttagctgctcctagacgtgaggcacgtactggtagaagacgtttgcgtagaagaaaacatcgtattgaacgcattaaaaatttgtttttaaatactcaactgctgacaaaagaacaattagagaagttgtatgaaggtgttttatctgatgtttatgaattaagggttaaaggtttagatgaaaagctgacggctgaagaagttgcccgagttttattacatttggcacatcgtagaggctttaagtctaatcgtaaagcagaaaaaactgataaagaaaatggtgcattgcttactgccgttagtgaaaaccaaaaacgtatgaaagataagcaatatagaactattggtgagatgttccataaagacgagctttttgcagaatacaaacgtaataaaggtggtacatacttaacaacagttgctagagaaatgattgcggatgaagcaaaatatattattgctacacagagaagctttggtaataaaacattgacaatagagtttgaagaaagttatttagatatacttttaagtcaacgtaattttgatgaaggacctggtgggaatagtccgtatggcggtgaccaaattgaaagaatgataggaaactgcacatttgagaaaagtgagaagcgctgtgcaaaatcttgttattcttttgaatactttaatttgttgcaaaaaataaatcatttacgattgttagtagatggtgtgaaggttgaacttgatggttctcaaaaatctaaagttataaatcttgcaaaaacgaaggcagatttaaaatatagccaaatcaggaaggaattgggattaggttcgcaagttctattcaatgctctagtttataattctgatgtagaagaagtagagaaaaaatcaaaatttaattttatgcctgcgtatcatcaaatacgtaaagaattagatacagttgtcaagggaagaatagaagctatagacatagatactcttgatgaaataggaagaattttatcaacatataagagtgatgctaaacgtatagaagcatttagtaatttgaatataacttcaaaagatatggaagcattgcttaatattaatggtttaagaaaatttggtcacttatcattaaaagcgttaaagaagattacaccttttttggaacaaggaatgatttataacgaagcttgtactgctgcgggttatgagttccgtgggcatagtggttatgaaaaaactttcttactaccgtcacaaacagaagaaatggaaaatgttactagccctgtggcaagacgttctatttcacaatccattaaagttattaatgccattattcgagaacaaggagaaagtcctttatacataaacgtggaacttgcaagggaaatggcaaaagattttgatgaacgcaaaaaaataaaaaaggaaactgacgaaaaccaagcaagaaacgaaaggctgatagaaaaaattagaaatgaatttcataagcagaatcctacagggttggatttagtgaaattgaaattatgggaagaacaagatggtgttagtccttactcacaaaaacaaatagttattgaaaggttgtttgaaccagggtatgtagatgtagaccatattgttccctacagtatcagctttgatgatactatgaaaaataaagtattagtttttgcttctgaaaatagagaaaagggtaaaaacctgccagtagaataccttgcacgtaaaaaaggacaaaaggctgttgatgactttaaggtatgggttactagtaatgttagaaattacaaaaaacgacttaacttgttaaagtcagaagttacggaagaagacttaaataaatttaaagagcggaacttgcaggatacaaaaacaatttctcgttttatgtataactatatcagtgaccatcttatttttgcaccgtctgaaactggtaagaaaaagcgtgttactgctgtcaatggggcgataacttcctatttgcgtaaacgttggggtataaataaagtgcgtgctgatggagataagcatcacgctgttgatgctttggtaatagcttgcaccacagataaactgattaaagaccttagttatcactcaagatatctcgaaatggaatacgaagctggcgaaaaagaaagtttgtgggtaaatcgtaatactggcgaaatagttaaacgttttccttatccgtgggaagattttagagcagaactaatggcacgtttatcagatgctcctgaagttgctttaagaaaattgcaattgttatattaccaagataaggatttaagtaagattaaacctatttttgtgtctcgtatgccacggcgtaagattactggagcagcacataaagctacagttcgtggggcacgttacgttgataaggggattgtaatttccaagaaatctttgagtgagcttaaacttaataagggtggtgagattgaaaactattttgctcctgaaagtgatagactactgtatgaggctttgaaggaacaacttaaaaagtttaatggcaatgcaaaaaaagcttttgagcaagggttttataaacctaaagcagatggtacgcctggtccaaaagttaataaagtaaaggtttatgataagtctactttaaatgttgccgtgcaacaaggaactggtgccgctgataatgatagtatggtaagagttgacgtttataaggtagaaggagatggttattaccttgttcctatttacgtggcagatactttaaaaaaagagttacctaataaagcaatagtacaagggaaaacttatgagcaatggaaagaaatgtcaccagaagattttgttttctctttgtatcccaacgatttgataaagattactcacaaaaaggagataaactttagtagagttagcgaagatagtacattagctgattcttacaaaacaaaagaagagttcgtttattataaaaagactagtatttcaacagctagtataagcataataaacaatgataatacatatactattcctagtttgggtgtaaaaacattagcttctctagaaaaatatcaagttgatattttgggtaactataccaaggtaggaaaagaaaagctacaaacatttgctgcttatcaacaagctaaaaagaagccttga

SEQ ID NO: 2007 - DNA, 3297 bp, Artificial Sequence
  OMNI-309 DNA sequence
atgaaacacattcggtatacccttggtatcgacatcggtattgcatccgtcggatgggcggtgctgcaaaacgatgtctacggtgagcctgtgaagatagatcgcctaggggttcgcatctttgaaagagctgaaaatccgaaggatggatcgtcattggcggctcctcgtagacaggcgcgcggtagccgccgtgtaatccgcaggcggaagcatcgcaaggatcgcatcaaaaagttgattgcatcctctggtatgatggaacaggagcagatcgacacactgttcactgccggacggtttgaaaaaagtgtctatgagctccgggtggatgcactggagcgaaagctgagtgtggaggaaacgatccgtttgctgattcactttgcccaacgcagaggttatcagtcaaacagcaaatcggaagaagcaaaagatgcgaaagaaaatggaaaggtaaagcaagcgatttcggacaatcgccaacggatgttggagcacggatatcgcaccgtgggcgagatgttttggaaggacgatctgttcaaacgtaccaatccggatggtagtgttgtactggtggttcacaatcagccggatgactataaagttacggttgaacgacagatgctgcgtgaggaacttcaattgatgtttgcccagcagcgtgcatttggaaatgaatgggcatctgaggcgttcgagtctgcgtatctggaaatttggggcagccaaagaagctttgatgaagggccgggcggaaatagcccctatggtggaggccagatcgagcgaatgctgggcacctgtaccttcgaggaggatgagcctcgtgcgccaaaggccagttacactgcggaatattttcggctgctgcaaaccgtgaatcatttgaagactgtgggccgtgggctgccaccggaatttttggatgaggagcagcggaaacttgtcgttgaatttgcccttgcttctcccaatggaacctatggacaacttcggaaaaagctcagcttgccggatgatgtttactttaacaatctgtactatggaaataagagcgcagtagaggttgaaaagaaaaaactgggcttgatgccattctatcacaaagtcagaattgcattggatcacgtgaaaaagggcgcgattcaggaattctctgcggagcagctggacaaaattgcgcgaatcttaacgctctataagagcgatgacaacagaacccaatatcttcgaaaagcccaaattccggagcaatatatcccggagttactggcactttctgcatcaaaggcagcccatctctccatcaaggcgatgcagaagatgatcccttatttggaagatggttgtacctatgacaaggcgtgtactgctgtttatggtcggcatgatggtaagaagcctggcgaaaagcgtagccagaagctggatattggcatggcgggcgaaatcacaaatccggtggttcgccgtgcagtttcccagacgatcaaggtgatcaatgcggtcgttcgggaatatgggccaccggaagtggtccgagtagagctggcgcgagaattgggcaaaccctatgaaatccgcactaagctggaaaaacggcagagcgcaaactttgaacaaaatgcggccattcgcagtcaaattgaggagtataagaaggacacgcccacaggactggacattgtcaagtttaagctgtatcaggagcaaaatggagtgtgtctgtactcaggtgaaaatctggacatatccagactgttcgaagcgggctacgtggatatcgaccatattattccatatagcatttcctttgacgacagctatcacaataaagtgctggtgcgctctagagaaaatcgccagaaggggaatcgcattccctatgcgtattttggtcaggatgaggtcagatggaaccgttttgagaccttggtcaacactcagatccgcagttttaaaaaacgcaaaaatctattgtgccataccttgagccctgaacaaattgacggctttaagcagagaaatttggtggatacccagtatttatcccgcgttatatttcggttgatcgatgagcatttggagtttgcggagaccggaaatgttaaacgcaagacccagacggtaaacggtgccattaccgcacaggtaagaaagcggctgggaatcgacaaggttcgtgccaacggagacctccaccacgcgaaagatgctgcagtcatcgcctgtatctctccgggaatgattcagaaaattacgcgctattcccagcgctgtgaatgcgcctggaccagagccggctatgtggattatgaaactggagaagtgatgacaaaagaagcatatgatgagaagtatgcgccgcgtttccctgcaccctggccccaattccgcgcagagctggaggcgcggttgagcgttgaccccagaggggagatcgaccagcttaaacttgcgacgtacgacagcgatgaagcacttttcccggtttttgtctctcggatgccaaaccacaaggtttctggcccggcgcaccaggagacgatccgcagtggaaagcaggcgggtggaaccgtcagcaaagttgccttgtctacgcttaagttggataagacgggagaaattccgggatattatcggccggaggatgatccgctcctgtacgaggcattgaaagaacgccttcgcgcctatgacgggaagggagataaagcatttgctgagccattttataagccaaaacataatggcgaaccgggaccggttgtcaagaaggtaaaagtgttcgataaggccacgttgacagtgcccattaatcatggcctggctgccaatggcaacatggtgcgcgtggatgtgtttcgggtcgaggacgagggctattactttgtcccaatctatgttgccgacacagtaaaaggagaactgccttgtcgagcggtagtggcacataaagcggtcgagcaatggaaaggaatggacgagaaggattttgtgttctcactttacgccggagacctcgttcatattgtcaaccataaggctatcaaattaaacctggcaaagggagccgagggcaacgaagttgcgctgaccaatgacgcgttgctctactatacgggattaaacattgcaacgggagcgcttggacttacaacgcacgataggcgttattgtcaatctggcttgggcggaaaaacactcgatctaatcgaaaaatatcaggtggatgtgctggggaactatacgccagtacgcctgccggagaagcgcatgaggttccaatga

SEQ ID NO: 2008 - DNA, 3438 bp, Artificial Sequence
  OMNI-322 DNA sequence
atggataaattatatagaattggttttgatattggtgtaggaagtgttgggtatgctgttttagaaaatgacccagttacagaagacccaattaaaattttaaaattaggcgttagaacatttagtcctaatgaggtgaaagatactggtgcaagtactgcgactgctagaagagaaaagcgtggtgttcgtaggcgtgcaagaagaaaaaaacttagaatgcaaaaattaaaagtattaatttcaagtcaacttcaaatagatgttaatcaaatgcaaaataatttgattaataaagatgtttatgagcttcgagccaaagcacttgatgaaaaaatttcaaatgatgagttagctaaaattattttaaatatagcaaaatatcgtgggtttaaaagcaatagaaaaagtagtaaagcatctggtgatgatggaaaacttttaaaagccattgaaaaaaataataagtttattaaagataatggttataggacttggggcgaagcagtttataaagataaaaatttcaaaattactgtggctggtaatgatttttataatgttagaaatcacggtggtgattataaaaattgtgtccaaagaagtgatttagaagaagaacttagattaattttaaagaagcaacaagagtttaataatttaattactgatgattttattgaattaataatcttagttttttcaagacaaagaaactttgatataggtccaggtaagcaaagtccttactttaaggaaaatggttttgctgatgatgttggctattgtactttctatgaagaagagcaaagggcgccaaaggcttcgtttacttttgaatattttaatgctttgtcaaaaattaatagtttgaaaattggtagcgagtttttatcattagagcagaaacaaaaattatatgaagaatttaagataaaaaaagagctttcttttgcacaaattcgtaaaatgtttaattttgatgatgaaaaatcatttaatctttgcaggtataaaacattaagtaaaaaggaaagagaaggtttaaatcaagaagagattgtcaataaaaataaagaattattttttgatagtgaaaagaaacaaaaacttgctagtatggagcatagctacgatattaaaaaagcattagggtatgagtcttcttatgataatagagagcttattgatgaaattgcatatatgctttcagtttataagagcgaagaaagaattgatgcttatttaaaaagtaatgataaagggctatttactttattaaatgaagaacaggtttcaaaaataaaagaattaaaatttgataagtttgcaagtttatcacttaaagctatgaacgaaataattccatatttacttgaagggttaagatatgatttggcttgtgaaaaagcaggttttaatcacagtagttttaagtttgaaaaactgaaatatttaaagggcgacaagattaaagcagaatttaaggatttaacttctaatgttgtaaaaagggcagcaaaccaaacacttagaattttaaatgaaattattaaggaatatggctcaccacaatttgtttctatagagcttgctagggaactttcacagcttcctagtgagagaaggaaatcttctgatttaatgattgctaatcaagataaaaatgagcagttaaaggaaaggctaagaagtgaatttaatttaattaatccaacaggtagagatattttaaccttaaaactttatgaagagcagaatagtaagagtatgtataccggaacaaaaatagaagctgatagattatttgaacctaactatgttcaaatagaccatattattccatatagcagatgctttgatgatagctataataataaagttttagttattgcagatgaaaatcaaaataaaggagatagaactccttatgagtattttggaaatgatgaacagagatggaatgaatttatagtaagagcaaatcttttacataatgctaaaaaaactagaaacttactaaaaaagaatttttcacaggaagaatcaaatgaatttattaatagaaatttaaatgatactcagtatgtttctaaattcttgcttaatttattccaaaaatatttaatgcttactccaagcaaaaagtttaaagaaattaagcaaataaaatgtgtttctggctcagtaactagttatcttagaaaatgttggggaattaagaagattcgtgaagatggagatattcatcactgcgtagatgctgcaattattgctagtgttagtgaaggaacagttcaaaaaataacaacatttaataagtttaaagaaaagtttttctttgataaaaaaaatgaaaggtttattagcaaaaaaacaggcgaggtgatgacggcagaagaaaaagaaaattatgaaaaagaaggtattgagcttttaaggggaactcttcctaaactctatgatggatttactcaggaattaaaaattagaagcaaggtaaattattttgattttaattttagcgatgaagataaaaatgctcttgtaaaacttggatactcgcaggaagaagtggaaagtttaaagcctgtatttattagcagaatgaaaaatgttaaaaccacaggtgcgattcataaagacacaatgatgagcacaagagaatttgatgaaacaaaatgtttaataaaaacagtgacattagataatttaaaaattgaaaataaagttgaagaagaacctcttaaagatgacaaataccctgagaaaagaattgcaaattattataaccctaaaactgatagattattatatttaaaacttaaagaaatgttagttgaaaaaggcaaaattttagataaagtttataaacctactaagagtggacagcaaggtccacttgttagaactgtaaaactttacgaaaaaagtagcaatcctgttattacaaagcatggcgctggcgcaaatgataaaatgtatagggttgatgtctatgaaaaagctaataaattctatctatgcccagtttatatgtcagatgtttataataaaactttaccaaataaagttattattagagataagccttgggctgaaatagatgatagctatcaatttaagtttagtttatatcaaaatgatttaattaaggttacaagtaataaagaaattgtaatgaaaaaagataaaaatcatcaaaataaattatctttaaaacctgatgaaattaaaaataatgaattttttgtttattataattcaacaaacatttcaacagcatctattgaagtaatttcatatgataattgttattataaagaaggtttaggagtaacaactcttaaaaatatagaaaaatactatgtagatataatgggtaaaatatataaatcacctaaggaagaaaggaaaaattttaatgggttatattaa

SEQ ID NO: 2009 - DNA, 3957 bp, Artificial Sequence
  OMNI-339 DNA sequence
atgaagcagaacggaaatcacgccgccataggtgactactacatcgggctggatgtcggcaccacctccgtcggttgggcggtcaccgataagcagtacaacatttctaagttcaaaggaaacgccatgtggggcgcacgcctttttgacgaggctcagccggcagcggcacggcgctcaagccgcaccgcaagacggagactggcaaggcgcaagcagcgcctgctgcttcttgagatgctttttgccgaggagctcaacaaggtcgatgaaagctttcttatgagaatgagcgaaagcgcactttggccggaggacaagtccgacacctgcccgttcagcctgttcggcggcagggattacaccgacaaggactatcaccggcagtatcccacggtgtatcacctgcgcaatgagctcgtgcattccgccgagctgcacgacataaggctcgtgtacctcgccctgcaccacatcatgaaaagccgtggacattttctgtacgcagactcaaacgacggcgaggccatctcagttgaggctgctctgtcggagttttccgagttcgttttcgccgaatacggcattagctttgagcctgcgcatagggaggattttatagcgcagcttataagcggggtgggagtaacggcaaagaagaagctcctcaaggctgcggcggatataaaagctgatgatgaggccgagataagcacgacggcacttcttgaccttctggcgggagcaacggtcaagctcagtgagctgtaccgtgacgaggagctcaagagcgctgagataaaaagtgtatgcttgaaaaatgacttggacgaggtgtttgacgagctaagcgagcttctgggcgacagagtagagctgataccgcaggcaaagcggctttttgatactgcccgcctgtcgtcgatgctgaacggccacaagtacataagcgaagccaaggtggagttatacgagcagaacaaggctgacctcaagcttttaaaaagctatgtcagaaaggccgcacccgagcagtataagcacattttctccgaaaagtcggataagcttgcaaactacgccgcatacaccgacggcgagtgcaagcaggaggacttctgcaagttcctgaagtctgtgctccccgagccggacgacggcgaccccgaagtgcagcggatatatgctcggataaaggatgggacgctccttacgaggctcaagggcagcgacaacggcgttatcccttatcagctccacaaaaacgagctcacggaaattttgaaaaacgccgagcgctacctgccatttctcaaggaaacggacgaagcggggctgagtgtctcggataagatcatcaagacatttgaatttaggctgccgtactatgtcgggccactgaatccggtatctccgaacggttgggcggtgcgctttcccgagcacacgggagagaaggtgtacccgtggaattttgaaaaagtcatcgatacggaagcgtccgcagcgggctttatagaaaatctcatcggcaggtgcacctacaccggcgagaaggtgttgcccaaagactcgctgctgtacagcgaatatgcgctgcttaacgagatgaacctgctgcgcatcgacggcaagcctctgccgattgaggactatcgcaggctgttggacgagcttttctataagtcaaagaaaaaggtcaccaaaaagcgcattcgcagctacctgctggccgaggggctgatagaagaggcggcggtcatcagcggagttgacgataatataaagtcctcgctcaagtcgtatcacgactttaagagcatcctcgagcgaacgggcgatgccgacatggtcgaggatatcatccgcagcatactcattttcggcgacgacaagaagatgctcagaagatggcttagcagaagcacccacgacctcacggacgacgacattaaatatatctgccgccttaaatacagcgactggggcaggctgtcaaaggtgtttctcaccggcatatacagccccgacgaatggggcgaggcaaaaagcatcatggattggctgcgcctcggcgagcgcaatctcatgcagctcatgagcaatgattttgagtttgcggcacatgcggcggagcatgcagctgagcttttcggcaccgaccgcacgctcggcgataagctcgacgacctgtacatcgcaccgtcggtgcggcgcagcatccgccagactctgcgcatagtcgacgagatcgtggatatcaaaaagtccgttcccgaaaagatattcatcgaggtggcaagggaaaatgccgacgaaatgaatcgcaagcgcaccgaaagccgtaaagatcagcttattacgctgtacaaaagctgcaaggaggacagcggtgagcttttcgagcgtttggaaaacgaggatgagaattcccttcgcagcgacaagctgttcttatattacacgcagctcggcaggtgcatgtattccggcgagcctatagacttcggcgcactgtctcgtggcgaaatgtacgacatcgaccacatcttcccacagtcaaaggtcaaggacaacagcattgataaccgtgtcctcgtcaaaaacggctataaccgcgaaaagacgaacatttatcccataaacgaaagcatccgcacgaaaatgcgccccatgtgggatcacatgaaaaagtataagcttatctcgcagaaaaaatatgatcggctcatccgctcgttcccactgaccgatgcggagcttgaggcatttgttgcccgccagcttgtggagacaaggcagtcgaccaaggcgctcgccggtctgctcaaggatatcttgggcgagaaggttcgcatagtatattcaaaggcgggcaatgtgtccgacttcagacacgacagcgactttataaaatgcagggaggtcaacgacctgcatcacgctaaggatgcatacctgaacatcgtcgtcggcaatgtgtacgacacaaggtttacaaagcggtttttcgcaaacatccgaaacgagaactacagtctgaacaaggtctttgctttcgatacaaaggatgcatgggacacaaagacctccatggcaacggtcaagaagtacatggcgaaaaacaatgtcatcgtgacccgcatgcccagagaggtcaagggacagctgtttgacctgcagctaatgcccgccggtaaggggcagctcgagaaaaagagcggcctgccgatagataaatacggcggctacaacaagctctcgggcgcatacttctgtcttgtcgagcatacggaaaagaaaaaacggataagaacgctcgaacccgtgtatgtgtataaaaagcagcagtttgaagccgatcccgaggagtattgccgtcagacgctcggcctgacggagccgaaggtgatagtcaacagaatactcattgactctctgctcgaactgaacgggcagcgtctgtatgtgaacggacgaacgggagagagactgatttttaagcactcatatcagcttacgctcggctatgagtgggagaagtacataaagcagctgcaaaagtattccgaacgatgctatgcaagaaggaccgaacttccgctgacagaccatgatggcattaccagggacaaaaacgaggagctttacggcctgttcatagaaaagtgcaggcaaaaggtctacgccgagcttttcggcaatatgcgtgcggatatggagaagcatcatgagaagttttccgccatgtccgagctaggtcaagtcaatctgctgctcgaggtgctcaaagcgttcaggtgtaatgcgcagaaggccgatttcaccaacctatgcggaaaaggctctgttggcatattggtcaaatccaaggcagtttcaaaactggacagcgcatatctcgtcaaccgctccgtgaccggcctttacgagacaaaggtcgacttgctcaaataa

SEQ ID NO: 2010 - DNA, 4044 bp, Artificial Sequence
  OMNI-354 DNA sequence
atgaaaagctatatgcagacagcaccatattatatcgcacttgacgtaggaaccaattctgtgggctgggcagcaacagacaaggaatacaatcttttgagatttaagggcaattcaatgtggggagtgcgtctgtttgacgaaggacaaactgcggaagaaagaaggataagccgaacaacccgaagacgcctcaacagaagaaagcaaagactcaatacattgtatctgctttttaaagaagagctcgacaagatagaccccgattttgataagagaatgaaggaaagctatcttataaatgcggataaaactacaggtacaaggttttcgctctttgcagacccggattatacggacaaggattttgcaagagaatacaagacaatgtatcatctgcgtcaggaacttgtaaagtccgagaaaccgcacgatgtaagatgtgtgtatctgggtgttcaccatattttaaaaagccgtggacatttcctctttgaagtaggtgaaaacgcagaagaaaacagaagctttgcagaggtgttcgacgaatatcttatagcaatccgtgataatctgggcgttgattgctcagtgtctgacgtttcagaagtccataatatagtgtctgacaaaacaatgaagcaggcagaaaaaataaagggaatagtaagcctaatcagcgttgctcttgatgaactaacggaagaaaaagagcttaagaaacaaatcgaagcttttgcaaagcttattgtcggtgcaaatgttgatttgaagaatatgtttggcgatgatacactcaagggaagctttaaagtaacagcagacgttgaaggcgacgataaattcaaagacctcagcgacaaacagctatcagtaatcgcagcagctaaaagcgtgtatgaccagataaagctcgaggagataatgggctcaagcaactatatctccgattatatggtaagcaagtacgaggagcaccggaaggatatcaaagcacttaaggaatttctcaagagtaaaggcagaattgacctgtacaagagaattttcagcgaaagaaccaagggacttaataactatgctgcatacgtaggatatgaaggtcaggaaagcaattgtacagcagaaaacctcaaggactttctcaagaaggagctgcaggagtacaagtctgaaataccggccatctatgacaaaataaccgagggtaaattcgcaccaaaacttcgaacaacagataacggtgctataccaagctctcttcacaaaaaggagctggttaaaatactcgagaatgcgtctgcatatctgccgtttctgaattctaaggatgcagacggactgagtgtcaaggacaaaatcatatctctttttgacttcaaaatcccttactatgtaggaccgcttaataattcgtcggacaagtactggattgtaagaagcaacgagaagataacaccttggaattttgacagggttgtaaactgtgaagagacagctaaagagtttatccttcgtatgaccggaaaatgtacatatacaggcgatgacgccctgccgcttgactcgcttctgtacagagagtataccgtgctcaacgaaatcaatgtaatcaagattaacggaaagccaatttccaaaagaataaaggatataatatacaacgacctctttgtgaaaagctcaaagaaggttacgaagaaagctatacatacgcatctcgttaacctaggcgaaataacgaaggatgacgagataacaggtgttgctgatacacttacaacatcactgcagtcctatcataagctcagaaggacaatcgaaaaaggttattcaagcgaactgatagaagagctgattaaaagcattgtcctgtttgcacaggataaaaagctccttaagaagtggataaaagagaagatgccggatgcctccgacgaagacatcaagtatctgtcatcactgaagttctctggctggggcagtctgtcaaaaacgctcctttgcgatataatgggtaatctcaacaccgaaacaggtgaggttatgtctgtgattgacgtaatgcgtgaaaacagcgaaaatcttaaccaggtgctgtataactacggatttgaaaaggctgcaaaggaataccgtgaaaacaagtatggcagccaggataaaatatcagatattctcgatagtatgtatatttctccgaaggtaagaagaagtattcgtcaggcaatgaaaattgtagacgaaatcatcggtataaagaaggctgcaccggagaagatattcatcgaaatggctagggacgttgatggtacaaataaaaaggaacaaaccaaatcaagaaaagagcagcttatagagctgtacaaagcatgcgaggaggatagtgcaaagctgcttgaagtatgtggagaggaaggaattgagaggtttaaggagctgtataataatctcgaaaacatagaagacagcaagctcagacaggacaagctgtatctgtactatactcagttcggcagatgtatgtattcggatgaatttatccctcttgatgagctgcaggataagaataagtgggacatagaccacatcttcccacgttcaagaataaaagacgacagcctcagtaacagagttcttgttaaagctcagctcaataggtcaaaaacaaacgaataccctataaatcaggatatccgtgataagatgcgtgacaagtggcttgttctcaagaataagaaaatgataaacgacaccaagtactcgcgacttgtacgctcagagccgcttactacagatgagctttctgcattcatcaacagacagattgtggaaacacagcaatctaccaaggctcttgccacaatactcgggaagcgttgtccagatagcaaaattgtgtactccaaagcagggaacgtctcggatttccgtaagtactatgcatatcgaagcgaagagccgtatacagagtttatcaagtgccgtgaccttaatgatttgcatcacgcaaaggatgcttatctcaatatcgtcgtaggaaacctgtatgatacaaagtttaccgctgagtttttcaagaatatccacaatgaggaatactctctcaataccgaagctatgttatcatggcctgttaaaggagcctggattccggaatcaaaggataagacacaaggcacaatactgactgtaagaaagacaatgggtaagaataatattctctatacccgtatgccaagagaagagcacggaaaactattcaacctgacaatactcaagaaggaaaaagacagtaatagcggaatgccggttaagaaggacaggagcatagaaaactacggtaaatatgataaaataaaaggtgcgtattttgcacttgtcgagcatactgaaaagaaaaagcgtgtccgctcccttgaaccgatatttatctgcgataaaacggaatacgaaaaggataacactgccttctttgagagcaaaggattcaaagacccaagagtcatagtgcctaagatacatatggattctgttcttgagcttaacggagtgaggtacaacataaagggcaggtcagatgataacatcatatatggtcatatgtgccagcttgtccttgattcacgtgctgtaacagtcatcagaaatacaacgaagtatctccagcgcatgtcaaagcagaaggataagaaggagcctacaaggtatgacggcataacagcggaggataatatttatttaatgggctgcctgattgataagattgataaagtaaaggattataataaatctattaaatgttctagaataattctcgaggcagaaaagaagaatttcgagaatggtagttatacattgtatgaacaatgtgtatcaatcagtaaggcacttataggcttccgttgtaatcaaagagtgtcgggatacaatggttcaacaatcagaataaataagaaggtttcctctttgagttcagcataccttgtaaatcagtctccgaccggattgtacgagtacaaaatcgacctgttaaaagactga

SEQ ID NO: 2011 - DNA, 3459 bp, Artificial Sequence
  OMNI-75 codon optimized for human cells
acaaagtacagcgtcggcctggacatcggaatcgcctcttgtggctggtccatcatcgacatcgagaagaaagagatcatcgacctcggcagcagaatcttcccttctggcaatgccgccggaaaccaggacagaagaagcttcagaggcaccagacggctgatccggcggagaaagaatagactgagcgacctgaccaagttcctggccgagaatggcttcgccgtgtccaacgacaagaatcagaacccctacgctctgcggagcaaaggactggccgaacagctgtctaaagaggaactggccaccgctctgtaccacatcgtgaacagaagaggcatcagctacgacctgggcgacctggaagatgatggcacaagcggcgtgtccgactacaagagcagcatcaacatcaaccggcagctgctgcgggaaaagaccatcggccagattcagctggaacggctgaacgagtttggccaagtgcggggacaagtgaaggccgacgatgagacaaccctgctgaatgtgtttcctagcgccgcctatgccgacgaggccaagcagattctggaaaagcaggccgagtactaccccgagatcaccgacgagtttatcgccaagatcaacgagctgatcacccggaagagagagtacttcgtcggccctggcaacgagaagtccagaaccgactacggcatctacaagaccgacggcagaaccctggacaacctgttcgatgagctgatcggcaccgacaagatcaatggcgagaagagagccagcgccagctctctgacagcccagatctacaatctgctgaacgacctgaacaacctgaccgtgcctaacaccgaggatggcaagctgaccaccgagacaaagaaagaaatcctgtccgccgccaagagagccgagggcatttttggcaaggtgcaaatctgcaagctcatcggcgtgaagttcgacgaactcaagaccaagaaaggcggcgagatcgagttcaagcacaccctgttcgcctaccggaagttcagaaaggccctggccgaaagcaacatcgaggccaatgatctgagcaccgagttcttcgataagatcgccgacatcctgacactgaacaccgagaaggccgagatccggaagcagctggataaggccgatttcgccatcagcgacgaagtgaaagaactgatcgtgaaagagaacaagaacctgctggtggacggcagagccacctggcacagctttagctataagaccctgaacctgctcatccccgagctgctgaataccagcgacgagcagatgaccattctgaccggcctgggcctgatgaagcccgataatgagaagtaccagggcctgaagaacatccctgccgctcagattaccgaagagatctataaccccgtggtggccaagagcacccgcgaggccatcaacgtgttcaacgccattgccaaaagagtgggcgccgagaatatcgcccacgtggtcattgagctgcccagagaggataacgaggacgacgtgaagaagcagaagatcaagttccagaaggcccaagaggccgaaaagaacgccgccgatgaactggtcaagcagcaaatgacaatccccgactctagcctgctggcccagtacagaaagttcaagggcctgagccagaaagtgcggtactggtatcagcaagagacattctgcccctactgcggcgagaaaatcaaagtgatccagctgatcaacaacaacgagagcttcgagatcgaccacatcatccccatcagcgtgtccttcgacgacagccagaacaacaaggtgctggtgcacagccagtgcaaccaggccaaagagaagcagacacccctcggctggatcaacaatggcggaggctttggacagaccaaagccgagtatattgcccgcgtgaaggccaacaagaatttcaacaagaacaaggtcgacaacctcctgaacgacgccgacctgaatgacatcatcacccggcggagcttcatccagcggaacctgaacgataccagatacgccagcagagtggtgctggacgagttctacagcttcttcaagagcaaccatctgccgaccaaagtgaaggtcgtcagaggcaagtggacaagccagatgcggaagaagtggaactctgccggcggactggccaagaccagagatacacaccaccaccacgccatcgacgcctctatcattgccagctttccactgctgaaggcctttgacaaggccgtgaagctgatcgacattgacaaagagacaggcgagattctgcaggacaaagccgccgtgaagaaagccagagaagccgaactgctggctcagtgggctatccccaacgagaaagagttcgagaagctggacagcgagatcttcgacttcccactgttcaagcaggtcgagctggccaacgacatcgacgaccctgagaaccctgtgaagttctcccacaaggtggacaaaaaggccaatagagccgtggccaaccagaccatctacggcaccagaatgaaggaaaccgaggtcgtcaagcggggcaagaccgaaatcgtgcaggacgagtacatcttcgggaccatcaagaacatctacaacgtggacgacttcgccaagttcaagaaactgtacgatgaggccctcaagaaagaggacgtcaagttcctcatgcaagagaaggaccccaagacctgggagaaactgctcaagatcctgaagaataccccggacttcgaggaaaagacacagacagacggcaaagtgaaagtgattcccgtgtcacccttcgagctgtacagaagagagaacggctttatcaccaaatacgccaagcacaacaacggccccaaggtggtgtccctgaagtactacgatagcaagatcggcagccacatcgatatcaccccagagaacgcccggaacaaggtggtcctgcagtctctgaagccttggcggaccgacgtgtactacaaccccgatacacagcagtatgagctgctgggactgaagtacgccgatctgaagttcaccaagggcgtgtacggcatcaccgaggaagcctacgagaaactgaagcacggaatcgaggccgacggcaccatcctgtggaagcctatcggcagaaacagcgagttccggttctccctgtaccggaacgacagagtgaagatcgtggacgataagggcgaagagattgaactgctgtttggcagcagagccggcaacaatgagggctacgtggaaatgaagcccatccacaaggccagatttgagggcgctgaggaaatcgccttctacggcaagaccagcagcggcagatttctgaagccactggccaaaaagggctacaagctgtacaaagtgaacaccggcatcctgggcaccccttactacacagagaaagagagcgaccagcctaagctgaacctg

SEQ ID NO: 2012 - DNA, 3183 bp, Artificial Sequence
  OMNI-79 codon optimized for human cells
gagaagagactgggcctcgacatcggcacaaatagcatcggctggtgcctgtacgagggcgactctatcctggatatcggcgtgcggatcttcagcgacggcagagatcctaaatctggcgcctctctggccgtggacagacggaatgctagagccatgcggcggagaagggatagatacctgggaagaagaagcgccctgatcaaggccctgaaggcccatggactgtttccagccgaacaggatgccgccaaggctctggaaagagaggacccttacagcctgagagtcagagccctggatcacagactggaccctcatcagatcggcagagccatcttccacctgaaccagcggagaggcttcagaagcaacagaaaggccgacagagtgctgggcgatcaagagagcggactgatcagcacagccaccagagttctggacgaagccatggccaaaagcggcgctagaacactgggagagtttctggccagccgggacactagaagagtgcggatgaggcctgacgtgaagggctacgacttctaccccaaccggcagcactacctggaagagttcgagaagatctgggacgcccagagccagtatcaccctgatctgctgtctcagcaggccaagagcgccatccaccggatcatttttcaccagaggccactgaagccacaggccgtgggaacatgtacatttgccggactgcatggcatccccggcgacgagacaagactgcctaaagctcaccctctgttccagcagcggcggctgtatgaggaagtgaaccagctggaaatcgtgtgcgccagcgctcctgccagaaagctgaccagagatgagagagatgccctgatcctgaagctgcaggacaagaaaaaagtgaccttcagcacactggcccggaccatcagactgaaagagggcgagagattcaacaaagagagcgagaaccggaaggacctggctggggatgaagtgcgggccgagatgagcgataagaccagattcggcagacggtggtttcacctgagcctggatgagcagtggtccgtgatcgacagactgctgaacgaggaaagcaccgaggatctgctggcctggctggaaaaagagtggtccctgccttctgatgtggccgaagccgtggctaatgcccatctgcctgatggccacggaagatttggcctgacagccaccgttagactgctcgaacacctgaaagccgacgtggtcacatatgccgaagctgctcggagagccggcttccaccactctgatttcagagatggcgcctgctacgacgagctgccttactatggcgagatcctgagcagagagatcgcccctggaaaggacgagtacggcgatccactggaaagacagtggggcaagatcacaaaccccaccgtgcacatcggcctgaatcagctgagaaggctgattaacgccctcgtgcggagacacggcagacccgatttcatcttcgtggaactggcccgcgagctgaagctgaatgagaagcagaaggccgaccacaagcggcggatcaagcagacaacagatgccgctagagctagagccgagaagctgagagaaatcggacagagagacagcggctccaaccggatgctgctgcggatttgggaagaactgaaccccagcaatcccctggacagaagatgcccttattgcgccgagcctatctccatcgagatgctgatgagcggcagcgccgacatcgatcacatcgtgccttacagcagatgcctggacgatagcgccgccaacaaagtggtggcccacaaccactgcaacagacagaagggcaacagaaccccttgggagcagtggggacagaccacaagatggcccctgattcaagaacaggtggcccggatgcacagatccaaacaatggcgcttcggccccgacgccatggaacgagttgatcgagatggcggctttatcgcccggcagctgacagatacccagtacctgtctagaatcgccgcacagtacctgagcgccctgtacacacctgatgaaggcagacgggtgtacgccgtgacaggcagactgactgctatgcttagacggctgtggggcctgaacgacatcctgcctgatcacaactgggtgctgaaccctcacagcaacgcccctaagaacaggctggatcatagacaccacgccatcgatgccgccgttgtgggagctacaacacccgccatgattcagcaggttgccagagctgctgcaagagccgaggaacaggacctggatagactgttcgctgacctgcctcctccatggccaggctttagagaggaactgcagggcagaattatggccgctgtggtgtctcacaagcccgaccatggaagaaagggcagaccactgcctggcagagatagcacatccggcagactgcacaatgacaccgcctacggctttactggccgcagaaatgccaagggcatgcctatcgtggtcaccagaaaacccctgctggccctgaaacctgaggacctgacagaccccgagagaatcccagatcctgctctgcagggcgcactgtttgaagccactagaggcgctaccggcaaggacttcgagaaagccctgcgggacttcagcagaagagatggcccttaccagggcatcagacggattagactgaccgaggctctgaacgtgatccccatcagagatagaaccggccacgcctacaaaggcgtgaaaggcgacgccaacgccagattcgatgtttggagactgcccgacggcaagtggatcaccagatggaaggatagagatggcatcgagcacagcggcatcgtgtccctgtttgatgctcaccagcctagccaggtgtaccacagacctcatcctgccgccaaaaaggtgctgagcctgagacagaatgacctggtggcagtggaacacgatggcgaccccggaaagatcatgcgggtcgtgaagtttagcgccaacggcagcatcacattcgccccacataatgaggccggacctctgaaaacccgggacaccgatcctgccgatcctttcagatacgtgacaacagtggccagcggcctgaagaagatgagagccagacaagtgcggatcgatgagctgggcaaagtgcacgatcccggacctagagaggat

SEQ ID NO: 2013 - DNA, 3276 bp, Artificial Sequence
  OMNI-91 codon optimized for human cells
atgagctacgccatcggcctggattgtggaatcgcctctgtgggctatgccgtgatggatctggacgagaagggcaaccccaagcggatcatcagactgggcagcagaatcttccctagcgccgagcatcctaaggatggcagttctctggccctgcctagaagagaggccagaagcacaagaagaaggctgcggagacacaagcaccggctggaaagaatccggtacatgatcgtggacgagggcatcctgagccaagagcagctggatgtgctgtactccgagcctgtgtccgacatctacatgctgagagtggacgccctggacagacccctgaccaatgaggaatttgcccgggtgctgatccatctggcccagagaagaggcttcaagagcaaccggaaggtggacaaagaggacaaggacgacggaaagctgctgaccgccgtgtctggaaacaccctgctgatgaaggaaaagggctacagaaccgtgggcgagatgttcgccaaggatgagaagttcagcagccagaagcggaacaaggccgagaactacaccaacaccgtgtccagagagatggtcgaggacgaggtgcacaagctgtttgccgctcagagagagttcgactgccccttcgccaacgagacagtggaaaacagatacgtgaacatcctgttcagccagcggagctttgaggaaggccctggcggagattctccttacggcggcaatcagatcgagaagatgatcggccggtgcacattcttcccagaggaacagagagccgccaaggccacctacagcttccagtactttagtctgctgcaggccgtgaaccacatcagaatcgtgtccgacggcagcatcagaaccctgagaagcgacgagcggaagaacgtgctggaagccgcctttcagaccgacggcctgaccttcaagagaatcagagccgtgctgggcctgagcgagaacgacagattccggaacgtgtactaccgcagcgacgacaaagaagagtgggagagcaagaccaagttccagtacctgcacgcctaccacgagatgcggaagagattcgacaagctgaagaagggccacatctccatcgtgtccaggaccgatctggatgagatcggctacgccctgaccgtgttcaagaccgacgacaagatcatcagctacctgaaagagcacaccagcctggacaagagcgagatcgatgccgtgctgatgatgcccagcttcagcaagtttggccacatcagcgtgaaggcctgcaaggccatcattcctagcctggaacagggcatgacctacgacaaggcctgcgagaacgccggcatcaagtttcagggccacgatagcgacggcaagaccagatacctgcctgccaatcctaacgacgcccctgagctggaagatatcaacaaccctgtcgtgcggagagccgtgtctcagaccatcaaagtgatcaacgccatcatcagagagcagggcgagagcccagcctacctgaatctggaactggcccgggaaatgagcaagagcttccaggacagacaagagatcaagaagtcccacgaccagaacaacgcccggaacgagaagatcaagcaagagatcgccgacaacttcggcaaagtgaacccctctggccaggacatcctgaagctgaaactgtaccacgagcagcagggcgtgtccctgtactctcagaaagtgatcgcctacgacagactgttcgagcccggctacgtggacatcgaccacatcgtgccttacagcatctgcttcgacgacagcttcagaaacaaggtgctggtgttcagcaacgagaaccgcgagaagggaaacagagtgcccctggactatctgagaggcgaagaggccaacaacttcgtggtgtatgtgaaggccaacgtgaaggactataagaagaagcagcggctgctgcggagcagacccaccgaagaggacatcaaagagttcaaagagcggaacctgaacgacaccaagtacctgagccggttcctgctgaattacatccaggatcatctgcagttcagcgagagcggcagcgataagaccaagcgcgtgacatctgtgaatggcagcgtgaccgcctacatgagaaagagatggggcatcaacaagatcagagagaacggcgatctgcaccatgccgtggatgccgctgtgattgcctgtgtgaccgatggcatgatcaaccggatcagccggtggtccaagtaccacgaaaccgagtacgaagagttcgagggcgagtcctacgctgtggaccctagaacaggcgaggtgctggatcggttccctctgccttatcctgagttccggaaagagctggactgccggctgttcgacaacgagaagcacatgcacgaggccctgaccagactgagcaactacagagatgtggaactgagcaccatccatccttgcttcgtgtcccggatgcctaaccacaaagtgacaggccctgctcaccaggatacagtgcggagccctagacactacgaagaggatggcatcgtgatcgccaagacagccctgcagaacctgaaactgaaggacggggagatcgagggctactacaagcccgagagcgacaggctgctgtacgatgccctgaaagccagactggtggaatttggcggcgacgccaagaaggcctttaaggacgacttctacaagcctaagtccgatggcaccagaggacccctcgtgcggaaagtgaaaaccttcaaaaagtccagcctgaacgtgtccgtgaacaacggcaaaggcgtggccgataatggcagcatggtccgaatcgacgtgttcttcgtggaaggcgacggctactacttcatccccatctacgtggccgacacactgaaagaggaactgaccaacaaagccgtggtggcccacaagagctacgacgagtggcgcgaaatgaaggaagaggacttccagttcagtctgtaccccaacgacctgatcctcgtgaagaaggccagcggcgccattcctctgaccatcaacctgaaggatagcaccctgcctccaaagattgagaagtccgaggtgttcctgtactatcggaagtccggaatcgctggcgccaccatcgtgtgcgataatcacgatggcagctactacgtgaccaacctgggaatcaagaccctggccagcatcgagaagtaccaggtggacgtgctgggaaactactacaaagtgggcaaagagaggcggcagagcttccggtaa

SEQ ID NO: 2014 - DNA, 3153 bp, Artificial Sequence
  OMNI-93 codon optimized for human cells
atgaagagaaagtgcggcatcggcctggacatcggcatcggatctatcggctacgtggtcatcagccggaccaacaacttcgacgccagaatcgaggatctcggcgtgcgagtgttcgacagcggcgagaatatccggaagaaggcctctaacgcccaagagcggagaggctatagaagcgtgcgtcggctgctgagaagaagaaagcaccggaaagagcgggtcaagaagttcttcctgaagatcaagctgatgaacgagatccagctgaaggcctgggaagagagaaacggcgaccagaacgtgctgcagaccagaatcaagggcctgagcgagaagctgaagcccgaggaaatcctggactgcatcatccacatctgcaaccaccggggctacagagagttctacgacgaggacagctgcaacgagaacatcaacaaggacgacctgaagaagatcgaaggcggcctggccagcttcgatgagctgtaccagcacggcaattacaagagcgtggccgagatgatcctgaaggaccccgtgttcaagaccgagacaaccttcgtggactaccggaaccacaagaacaacaaccgctacgtgctgatcaagcgcgagttcgtgaagaaagagctggaaaacatcctgcaccagcagagcaagtactaccctcagctgaccgagaacaacatcaagatcatctgcgacaacatggtgttcatccagcgggactttgagacaggccccggaaacgagaacgacaagaccagacggttcatgggcttcatcgacagcatcggcaagtgcatgtactacaaggatgagaagcgggcctaccggtccaccgtgattgccgatatctacgccctggtcaactgcctgagccagttcagcttcatcaacaccgaaaccggcgagatcctgctgcctgataatgccgccacaaagatcatcgacacagccctgctgaacgccgccatcaccgagaatgatatcaagaacatcctgaagccgtaccacctggaaatgagaaagcctgagaagctgcaagtgaaggtgcccgataccgtgcggacactgaagatcctgaaaagcgtgctgaccaacgccggctataagtacgaggaactgatcaaagagaagcagttcgacgtcaacaaccccagcaagctgcatcagctgtgtctgctgctgagcgaaaacatcacccctgccagacggacccgggtgctgaaagctaaaggctggaacgagaaactgcagaaagaagtgattcggaagaagttcggcggcaccgccagcgtgtgcgagaagtatatgatcgacgccatcgaggccttcaagcggggcgagacatatggcaatttccaggccagaatgctgaaagagagagaggaaaccctgtccgagagcaagaagcagaagtttctgagccccttcgacaagaaaatcgacgaagaactgattaagaacaccgtggtgttcaagtccgtgaacgagactcggaagattctgaacgagctgatcagaagatacggcagccccgagtacatcaatatcgaggtggccgacgacctgggcagaagcttcaaagagcggtctaagatcatcaagcggaacaacgacaagcagaaggaccgggaaaagatcaaaaacaaactgatcgaactcggcctgcggaaagagggcgaagtcaagcctttcgacatcgagcggtacagactgtgggaagaacaagagggcagagatctgtataccggcgaggccattcctctggaaaagattctgtccggcatctacgatgtggaccacattgtgcccttcagcctgatcctggacgacagcctgcagaacaaggccctggttaatctgggcgtgaaccggcagcagaaaggccagcaagttcccctggctttcctgaacgtggtggacaagatcgactacctgaagagagtgaacgtcctgtacaaaaacaagaagatcagcaccaaaaagtacaagtacctgatgctgcccaacctgtacgccaacagcgagctgctgacagagtggaagtccagaaacatcaacgacacccggtacatcacccggttcctcgtgaactacctgagcgccaacctgctgttcgactccaccaagaccaagaacgtgttcggcgtgaagggcatcatcaccagcaagatgcggaagctgtggctgaacaagaaaacctggggcgacgagcagaagaacagagacaacaatctgcaccacgccgccgatgctctcgtgatcgctaatctgacacccgcctatctggaaatcgccagcgacaagattaagctggaccggatctacaaggactaccacaaaaagatctccaacgagtacctgacctacctgtccaagtctgtgaacaagatggtcaagtactatggcttcaacaaagagtacgccgagaagctcctgggcacccctaatagcagaatccccgccatgatccggaatatcgccgacgaggccgatatcaggctgtgggacaacagcatcgagtactataaggacgtgtccgaggaacagttctacaagaacgtcaaggccttctacaacgacgacaccgccttcgccaaatccgtgaagcctgtgctggtgtcctataagcagaaccggaagtaccagggcaagttcaccaaggacaaccctctgaagaaaaacgagatcaagggcgccttcatcgagaagattgacagcctgggcaacgtgaacattctggacgccaaagagtattactgcgccgagctgtacaagaacctgcagggccagaccatcctgcggggcatcagatatgtggacctgcagaaaaagaacaaaaagctgtacatcatcagcagctaccccgaggactacaagaaacacatcatgtacctcttcgccaacgactacatcaaggtgttcgataacgacggcaagatcaagttcaacggctactacaagagcatcaagaatgtgaaccggaacgccatctactacaaaaacaacaacagcaacatcctggaagagaaaaccatcagcaagaaggacgtcgtcaagaaatactccgtggacatcctgggaaagatcggcggagagatcaagtgcagcgtgcccttcctgagcctggaagaaaacatctga

SEQ ID NO: 2015 - DNA, 4047 bp, Artificial Sequence
  OMNI-103 codon optimized for human cells
atgtctatcaagagcgactacttcctgggcctcgacatcggcacagattctatcggatgggccgtgacagaccccgagtaccacatcctgagaagaaagggcaaagccctgtggggcatcagactgttcgatgccgccaatactgccgccgagagaagaaccttccggaccagcagaagaagaatccagcggcggagacagcggatcagactgctgcaagagctgttcgccgaggaaatggttaagctggaccccggcttcttccagagactgagcgatagcgccttctggcaagaggacaagcaagagcagcagatctacagcctgtttacctgcgagaactacaccgacgtggactactacagagagtaccccaccatctaccacctgagaagcgccctgatccaagagaaaaaagagttcgacctgcggctgctgtatctggccctgcaccatctgatgaagcaccggggccactttctgttcaacggcagcatcaacaacgtgaccagcttccacaccaccttccagaccttcgccgactgcctgtacgacgagttcgacatcgagctggaatgcgacagcgaggacagattcgccgagatcctgaaggataagcacgccagaaagaccggcaagtgctctgagctggaaatcatctgccacatcgagaagtccaacaagcagctgaaagaactgttcaagctgatcaccggcatgaaggccagcctgagcgtggtgtttggagatgatgagctggccgagatcgagcacaacaagatcagcttcagcgagagcagctacgacgaagtgcggctggccctggaagatgagattcaagagagaaccggcatcctggacatcttccacgccgtgtattcttgggccatcctggccgatattctggaaggcggcgagtacgagggcaacagctatctgtctgtggccaaggtgtccacctacaagaagcacggcgacgacctgagactgctgagaacactcgtgcgcgagtactgccccgaccactacaagagctttttcagcgtgtccggcaaagagaactactgcgcctacgccggcacactgaagaagaacggcaagaagcagcccatcaagcggtgcagccaagaggacttctacaaggccctgaagaaactgctgaaccagatgcctaccgagcagcccgaagtgaaggatatcttcatcgagattgagaacggcaccttcctgcctctgcaagtgtccaaggacaacggcgtgatcccctaccaagtgaacaagatggaactcgagaagatcctgcagaacgccgaagagtacctgcctttcctgaagaacatcgacgaggaatgcggcaagaccgtgtccaagaagatcatcgacctgttcgagttcagaatcccctactacgtgggccctctgaataccgccaagggcgagaattgctggatggttcgaaaagaggccggcagaatctacccctggaacttcgatgagaaggtggacagagatcagagcgccgagaagttcatcagacggatgaccaaccagtgcacctacctgatccacgaggacgtggtgcctaagaacagcctgctgtactccgagttcatggtgctgaacgagctgaacaatgtgaagattcggagcgagaagctgcccgtggaactgaagcaggccatcgtgctggacctgtttaagaagcagaagcagatcacagggaagaagctgctcaactacctgaacgccaacggctacgacgtgaagaaagaggacctgagcggcttcgacggcaacttcaagtccagcctgtccagctacctgactctgaagaaggtgttcggagaggaactggacaagtacagcgtgcagcagatggccgaggacatcatcctgtggatcaccctgtatggcgacgatcagaaaatgctgcggagagtgatccggaagcactacgagcagcagctgtctgaggaacagatcctgagcctgagcaagctgaagttccaaggctggggcagactgtctagacggctgctctctgaaatggaaggcgtggactgtgaaaccggcgagtgcatgacagtgatgcagggcctgagaaacacccagaacaacctgatgcagctgctgagccagcagttcagcttcatggaactgatcgaggaagagaacgggaactactacgtcgacgagatcacctacgacaacctggtcaaggacatggtcatcagccctagcgtgaaaagggccgtgtggcagacagtgcagatcgtggaagaaatcaagggcgtgatgggatgccagcctaagaaaatcttcgtggaaatggcccgcagcgacgaagagaagaaacggaccgtgtctcggaaggatcggctgctggaagcctacgacgccatcaaggatgaggcccggcaatggcaagaagaactgcagaaatactccgacggcgatttcaaggccatcaagctgtacctgtactacacccagatgggccagtgcatgtacaccggcagaaaaatcgatctgtcccagctgaacgacgccaccgtgtgggatagagatcacatctaccctcagagcaagaccaaggacgacagcctggacaatctggtgctggtggatagatccgtgaatgccaagaaaagcgacggcatgctgagccccgagatccagcagagaatgagagccacctggaagtacctgaaagaaaagaagctcatcagcgagaagaagtacgagcggctgaccagagtgtcccctctgacagatgaagaactggccggcttcatcaaccggcagctggtggaaacaagacagagcagcaaagccgtggccacactgctgaagagggtgtacgatgaggccgagattgtgtatgtgaaggccgaggccgtgtctaacttccggcgggataacctggactacatcaaagtgcgggacctgaacgactaccaccacgccaaggacgcctaccagaacatcgtcgtgggcaacgtgttccacgagaagtttaccagcaatcccctgcggtggctgaaaaacaaccccaacaccaagtactccctcaaccagatgttcaacttcgacctggaaaagaacggcgtggtcatctggaagagaggcaaggccggctccattaagtgtgtggaagagacactgaagcggaacgacatcctgttcaccagatacgctttctgcaacaaaggcggcttctttaatcagatgctgaccgccgctccagaggataagacaaaggccaaaggcctggtgcctatcaagaaaggcatggaaacctggaaatacggcggctacaccagcgtgacccctagccactttatgctggtggccagcaaggacaagaagggaaaagagatccggaccatcgagacagtgcccctgtaccggtggaaagagttcaaagagaatcccgacgctctgctccagtactgcagagagttctacggcctgaaagagcccaaggttctgatcccttgcatcaagaagaatgcccggctggtcgtgaacggcttccctatgcacctgaagggcagcaccggaaaacagctgattctgcagggtgccgtgcagctgtgcctgaacaacgagaacatcaagtacctcaagaaagtgacgaagtacctcgagtacaacgcccagcggagagacaagagaaccctgctcgaagttcgggaagtgaccggaatcaacaaagaggaaaacatccagctgtacgatgtgttcgtggacaagctgagcaacacaatctaccagtacagacccgccaatcctaaggacaacctcatcaagggccgcgagaaattcatcgagcttggcctggctgagcagtgcgtggtgctgggagaagtgctgcatctgttccagtgcaagcccctgaccagcgatctgacactgatcggcggaagccctaacaccggcaccatcaagatcaccaagaccatcagcaactgcaacgtggtcaagctgctgtcccagtctatcgccggcgtgaaagtccgcgagatcaacctgctgatcatctga

SEQ ID NO: 2016 - DNA, 3327 bp, Artificial Sequence
  OMNI-104 codon optimized for human cells
atgaagtacaagctgggcctcgatctgggcagcacatctcttggatgggccgctgtgaagctgaatgatgctggtgctgtggaacagctgctggacttcggagtgcggatcttccctgacggcagagatgccaagacacacgcccctatcaatgtcgtgcggagagccgccagaacaatgcggagaagaggcgatagagtgaagctgcggaagaaacgggtgctgcagctgatccggaagtacggcctggatttcgacatcagaagcaaccccatcctggaaaacccctacgagctgagagtcagagccctggaacacagactgagccctagcgaactgggcagagtgctgtttcatctggccctgagaaggggcttcaagagcaaccggaaagagacaaagggcgagaacggcggaaagctgaaagccgctacagatgcccttgcctctgccgttggagatggcacactggctcagttccaggtgcagaccaagaagttccggttcagcaaccagttcgacggcaacgtgatcaaggacggcgccctgtatcctaccagagacatgtacctggacgagttccaccggatctgtgacgcccagggactcgacaaagagatgagggccgccttcgagaacgccatctttttccagcggcctctgatccctcctgtcgtgggcacatgtatttttgccgccggacagcccagggctcacaagtttgaacccgtgtttcagagatggcgggctctgcagcagctgaaccagctggccattctggacaacggacagaacgtggccctgaccgatcagcagagacagtgcctggtggacatcctgctgtacaacttcaacggcgtgaagagagacagaggcggccgagtgaagatcaccttcgccgagattaagaagcagctgggactgagccggaccgtgaagttcaatctggaaagcgagcagcggaaagaactgaacgtggacagcaccggcttcagcttcgccgaaatcggagagctggacttttggagaagcctgaccgacgagcagcagagcgacgtgctgaacaagatcaacgacgaccagaccgaggacgccgagctgattgaatacctggtggcccactatggcctgagcgcctctagagccagagccatcatcgacatccctctggaagatgacgtggccaatgtgtccgtggtggccatgaagaagatgctgcctttcctggaaggcggacagctgtatcacctggccgtgcattctgccggctatcactatggcgaacaggacgtgcccctgatggacaagctgccttactacggcgacctggatgtgctgaagcctagcctgatgcctgccagagatggggcctacagaaccatgaacgccaccgtgcacattgccatgaaccagatcagagtggtggtcaacgacctgatcgagagatacggcagaccctgcgccatcaacatcgagcttggaagggacgtccgcgctggcgccaaagaaagagcagaactggataagcagcagtccgccaacaagcggaagaacgatgccattagagccgagctggccgagatcggcatcctgaatccaagcagagaggacttccagaagtataagctctgggagaatctggcccctcagcctcagaatcggagatgtgtgtataccggcgagcccatcactagcctggccgctctgtttaagagcggcagattcgagatcgagcacatcctgcctttcgctcagaccctggatgacagcctggccaacaagacaattagcgccgtggccgccaaccggttcaagggaaatagatctcctgccgaggccttcgacgatcctgcctctccttgggcttatgccgatgtgtgggctagagcccagaatctgcctgatggaagccgttggcgcttcgacagggacgccatggaaaagttcacccggcacggcgattgcattgctagggccctgaacgacacccggtttatgagcgtgatggccgtgaactacctgaagcacatctgcagcgacaagaacaaagtgcggggactgcctggcagactgaccgccatttttagggacatgtggcacctggactggtggaagaaccacgacgacgccgatacctacagagcctctcacatccaccacgccatcgatgccttcgtgattgcctgtatgggagccggcaatctgcagaagctggctgaaaacgccacacacctggaagatttccacggcaagacactgaaagagaagcacagacagctgttcgccgatatgtacctgccatttcctgagttcgactactacgacttcagaatgagatgcgaggcctgcgtgatcagctacagaccctctgtgaaagagcctgccgccagcgatacagtgggatgtctgcacgaggataccgcctacaagctcgagaagttcgagacaggcacccgggccaccatgagcagaagaattgctctgcctaccaccgccgatgccagggccaagttcaagaaggacttcgactctctgaaccccaagactctggaaatgttcctggccgaaaccggcgtggccaacgacgccaatgatatcgccgaccagttcctgaattggtgccagatgcggggcatcaagaaagtgcggatgttcaagaccagagtggacaccaccacctacgtgcccgtgttcagaaacaggggcgataagaacgccttcaacagagcctggacagagtggtacgccgctgccggaattgccagaggaatgacagagcctaaggccaagaaggcccagcaagagaaagagagaaggctgctggccctgtaccagaatgccgccgctagagcctacaagtggttcgtgtccggcaacaacttctgcgccgacatcttcgagatccgcagcgacgacagaagatatcctgctctggctggccagtggcagagcgagatcatcagcaattactgcgccacactgaacaacggcacccctatgtggcggtgcaaatacgccaccgctcggagagtgatgcggctgagaatcaacgacatggtcatggccgagttcagccgggacaatgtgcctctgctgaaaggactcgaggatgccgttagacatcagctggctgtgcaggacaccgacaccgtgaacatcatcttccgcgtgaagaaaatcagcagcaacggggccatcttcctgcggcctcactacattgccaaagaggacgctgacaccaagacatggaaggccaatgccaccagcctgcagaagtacaaagcccggaagatcagggtgtcccctaccggcaaagtgctggaatga

SEQ ID NO: 2017 - DNA, 4152 bp, Artificial Sequence
  OMNI-120 codon optimized for human cells
atggaaaagcagaactactacatcggcctggacatgggcacaagctctgttggatgggccgtgaccgacgacagctaccacatcatcagacggaagggcaaagacatgtggggcatcagagagttcgaggaagccaagaccagcgccgagagaagaagccacagaatcagcagaagaaggctgcagcggagcaaagtgcggatcggcctgatcaagatgtacttcgacgaagagatccggaaggtggacccattcttctacgagcggctggacaacagcaagtactaccaagaggacaaggacgagatcgtgaagtcccctaacggcgtgttcaacgacaaagagtacaccgacaaggactactacaatcagtaccccaccatcttccacctccggaaagagctgatcaacaacgagaacgccccttacgacgtgcgcatcgtgtatctggccgtgctgaacctgttcaagcggagaggccacttcctgaacagcagcctgagactggatgacgagagcgccgagtttagcctgaaggacgcctacagcaacctgctgaccatcatggccgacaacctgcctgaggaactgtctatcgcctttcctgagatcgacagcgacaacacctacctggaactgcagaacatcctgggaacccgcgagttcggcagaaagcagaaaggcgagaaggtggccaagctgctgggcatcgaccgcaagcagaaaaaagagatggaaatcgtcaacggcatggtcggactgagcatcgactgctgcaagctgttcgacatcgaggccgatagcaagatcaccgccaagttcagcgatttcggctacgccgagaaagagcccgagatcctggatcagctgggcgacaattacggcagcatcctgatggccattaagaccgtgtacgacatcggcagcctgaccgagattctgaagggccagaagtacctgagcttcgccagagtggaagattacgagcagcacaaggccgacctgcggaagctgaagaaagtggtcaagaagtacgccctcgagcgctacgactacttcttcagacagaaagaggacggcacctacagcgcctacgtgaactccgtgaacagcgagaagtacaacgacctgggcagcaaggacaccaagcctaacagacggaacatgaaggcccggtccagggacgatttctacaagggcgtgaagaaactgctgaagggcatgccagaggacgacgccgatgtgatcgagatcaacaagaagatcgagaacgagacattcatgcctaagcagctgaccgccggcaacggcatcattcctaatcagctgcacgccatggaactgaagaagattctggacaacgccagcggctacctggatttcctgaacgatgtggatgagagcggctttgccgtgaaagagagaatcctgcggctgtacaccttcacattcccttactacgtgggccccatcagcagcggctctaagacaggatgggccatcagaaagcctggcttcgagaaaggcgtgatcctgccttgggaactcgacgagaagattgaccggaccgagacagccaagcggttcatcgacagaatggtccgacggtgtacctacctgaacgacgagatggtgctgcccaagtccagcctgaagtacgagcggtactgcgtgctgaatgagattaacaacatccggatcgacaatacccggatcgataacgacctgaagaagcggctgtttaacgagatctacctcaacggcaagaagcctggccggaagaaaatcgagagcttcctgtacagaaacggcgtgcccagagatgcccaagtgaccggcatcgacaaagaactgaacaacgccctgtccagctacggcaagttcaaagagatcttcggcgacgagctggaaaaggacagcgtgaaaaaaatggtggacgacatcatctttcactgcacagtgtacggcgacagcaagaagttcatctacgattacatccagaagaactaccccgagagcgagtaccctctgctgaacaagaaaaccatcaagcgcatcatcggcttcaagttcaaggactggggcagattcagcgaggaaatgctggacctgcagggctgcaattacgagacaggcgaggtgtactccatcctgacagccctgtgggagacaaacaacaacttcatggaactcatcaacagcgacagcttcgagtacaagaagctcctggaagagaagtccggcagcgccatttctagcctggctgaagtgacacccgagctgctggacgagtactactttagcgcccctgtgaagaaaatgatcctgcagaccatgggcgtgatcaaagaaatcgtgcagatcatgaagtgcgagcccgaccggatcttcatcgagatgaccagatccgacggcgaaaagggcgacaagggcagaaaggactccagaaagaaggccctgctggatctgtacaagaacatcattgacgagctgcacgacaagaattactggaaggacctgatcgagaatgccgataaggacggccggctgcggagcaagagaatgtacctgtacatcaagcagatgggcatggacatgtacaccggcgagcccatcgatctggactacctgttcgatgagaaccgctacgatatcgaccacatctaccccagacacttcgtgaaggacgacaacatcgagaacaacctggtgctggtcaacaaggccagcaacgccaaaaagaccgacatctatcccatacctggcttcatcaaggacaaccccaaagtgtggaagctctgggagatgctgcacaagcggggactgatcaacgacgtgaagtacagcagactgcgcaacagcgagcccttcacagatgagcagaaggccggctttatcgccagacagctggtggaaacaagccagggaacaaagggcgtgtccgacatcctgaaacaggtgctgcctcagaccaagctggtgtatagcaaggccggcaatgtgtcccggttccgctccgacaacaagttctacaagagccggctgatcaatgactaccaccacgccaacgacgcctatctgaacatcgtcgtgggcaacgtgtactacaccaagttcaccagctctcccatgaatttcatcaagaacgagtacagcaaggattccaagaagtttgagtacaacctggacaagatgttcgcctggaaggtcgagagagatggctacaccgcctggattcctctgaaaaagggcaacgagtatatcgccaccatcaagaccgtcgagaagatgctggccaagaacaccccactgctgacccggcagtctttcgtgaaaagcggagtgattaacaaagtgaccctgtacggcaaaaacaccgccacacacgagacttacatccctctgaagatgagcgaccccaagatgcaggacgtgaccaaatacggcggctacacctccgtgaatatctgctactttttcctggtggaacacgagaagaagggcaagaaagtccggacaattgaggccctgcctggctatctggaaaagaaggtggaaaacgaccccgccgaactggaaagatactgtgtggaaggcctgggcctcgagagcccttctgtgcggtacagaaagatcagaatccagagcctgctgaaagtggacggctactacatgcacctgtccggcaagagcggcaatagcctgatcgtgcggaatgcctgtgctctgagcattggcaagaagtggcaggactacatccactacatcgaaaagagcgaagagaacggctttaagtacgacgactcccggatcaccaaagagaacaatatcgagctgtacgatatcatctccgagaagcacatcgacggcgtgtacaaaaagaggccttgcggcatcggcgacgccgtgaagaacggaaagaagaagtttaaagagcttaccaaagaaaatcagtgcaaagtgatcctccagattctgcagatcagcagcatcggcaactataaggccgatctgtctctgatcggcggagccagcatgatgggcaacatgcggatctctaaagagatcacaaagaacgagaaagtgatgctgatccaccagagcgtgaccggcctgttcgaggacaaactggtggacctgaagtccatctga

SEQ ID NO: 2018 - DNA, 3288 bp, Artificial Sequence
  OMNI-124 codon optimized for human cells
ggcaagatcatcggcctggacatcggaatcgcctctgttggatgggccgtgctggacaaggacagctacaagatcgtggaagccggcagcaatatctttcctgccgccgaggccagcaagaatcaagagagaagagagttcagaggcctgcggcggatgaccagaagaagaaggaccagactggacgacttcaagaagctgtggaagaactactacaagaacgagtacagcgtgacccctaacaacgtgaccgagctgaaagtgaagggcctgagcgagcagctgtccgagctggaactgtacaccgtgctgtactcctacctgaagcaccggggcatcagctacctggaagatgccgtggatgagggcaagaccggcagcgattatctgaagggactgcagaccaaccagaaagagatgaacaccaagtttcccagccagatccagtacgagcggctcgagaagtacggctgcttcagaggcgagaacaaggtgtccgatgacgaggtgctgagcaacgtgttcaccaccagcgcctacaagaaagaaatcgaggaactgatcagcgtgcaggacaacctgggcaacgagctggataaggacttcatcaagaagtactttgagatcttcagccggaagcggaagtactacgaaggccctggcaatgagctgagcagaaccgactacggcatctacaccaccaagatcgacgagaacggcaactacatcaccgacaagaacctgttcgagaagctgatcggcaagtgcagcgtgtaccccgaggaaatgagagccagcgccgcctcttacacagcccaagagttcaacgccctgaacgacctgaacaatctgatcgtgaacggccggaagctgaccaaagaggaaaagatcagcatcatcgagtgctacaagaccgagaaaaccatcaacgtgcggaagatcattaagaacgtgatcggggagaacatcgaccagctgagcggctaccggatggacaagaatgacaaagagctgtaccacaccttcgaggtgtacaacaagctgagaaaggccttcgaagaggccggcatctccttcgacttcagcagagaggactttgacgagatcggcagaatcctgacactgaacatcgagagagagggcatcgaggacgccatcagaatcagcaatctggtgctgtcctctgacgccgtggacgtgctgatctccgtgcggaaaaagaacgccagcctgttcagcaagtggcacagcttcagcctgaagatcatgaacgagctgatccccgagatgtacgagcagcctaagaaccagatggaactgctgagcgacatgaagtccatcaagagcaagatggatgagttcaagggcctcgaggatatccccgtggaaaccatcattgaggacatctacaaccccgtggtcaagcggagcatccggatcaccatcaagattatcaatgccctcaagaagaagtatagcgacatcgagaagatcgtgatcgagatgcccagagacaagaacagcgacgaggaaaaagagcggattaagaagttccagaaagaccaagagaatgagctgcccaacatcatcaagcgcgtgaaggacgagtacggcatcaccctgacacctgagctgatcgccagaaagaaaggactggcctttaagctgaaactgtggaacgagcagaacggcagatgcccctacagcggcagaatgatcgacattgagagcctgatcaacgacggcgatctgttcgaggtggaccacatcatccctctgagcatcagcttcgacgacagccggtctaacaagaccctggtgtacagagtggaaaatcaagaaaagaagaacaacacgcccttcatgtacctgagccggctgaacagacagtggaactacgacaagttcgccgccttcatcaaagaactgtacggcagcagcggcaaggaccggaagaaattccggaagaagatgaacaacttcctgttcaccgaggacattaacaagatcgatgtgctgaagggctttatcaaccggaacatcaacgacaccagatacgccagcagagtggtgctgaatagcctgcagggctacttccgggccaacgacaacaatgtgaaagtgtccgtgatcaacggcagcttcacccaccagatgagagtgaacctgagcctgggcaaagacagggatgagtcttttgcccaccacgctgtggacgccatgctgattgctctgagccagatgggctacgacgccttcagagccagacagaaagacatcgtggacttcgagacaggcgagatcatcaatggcagcgcctgggagaaccaggatgagatgtacaagacagtgctgtatcaagagaagtggaagaatatcaaggacaatatcatcgaagccgagccgaacatcaagtactggcacaaggtggacaaaaagtgcaaccggggcctgtgcaaccagaccatctacagcacacggaagtgcgacgataagatctggaaagtggacaagctgaacatccgcgacaaggacgacgtgaagaaactgatctacatgatccagaacggaaaagaggacaaaatcctgatggcccagaacgaccccaagaccttcgccaacctgaagtacatcctggatgagtactccgactgcgagaaccccttcgtgtcttacgagaaagaaaccggcgacctcgtccggaagtacagcaagaagcacaacggccccaagatcacctacctcaagtacatggtggaagaagtcaacagctgcatcgacatcagccacaaatacggccacgagaagggcagcaagaaagtgtttctggcccagctggtgcccttccggaccgacgtgtactacaacaacaactccggcaagtactacctgatcggaatcaagcagtccgacatcaagtgcaagggcaaccagtacatcatcgacgaagagaagtacaccgacaacctgattcagaacggcctgctgaaagagggccagaagatcgaggacctggaaaagctgggctacctgttcaagttcagcatcttcaagaacgataccatcgagtttgagaagaagggcgagctgattaagtgccggttcctgtctcagaactccgcctccaagaaccggatcgaagtgaagcccatcggcaagaaggactacgagagccggaatctgcctacactgagcaccaccacagtgatcaacaaatacgtcaaggacatcctcgggaacgaaaaacaggtgtccggcgagaagttcgagatcattgtggacagcaag

SEQ ID NO: 2019 - DNA, 4110 bp, Artificial Sequence
  OMNI-125 codon optimized for human cells
atgaagaaggtgctgggcctcgatctgggctctgcctctattggatgggccgttgtgaacgtggccgagacaaaagaggaaaaggccgccatcctcggctgcggctctagagtgattcctatcagcgccgaagagaaggacagcttcgagaagggcaaagccatcagcaccaacgccgacagaaccctgaagcggggcatgagaagaaacctgaagagatacgagcagcggcgggacgacctgagaaggctgtttatcgatcaaggctggatcagcgacggcgagcctctgtctgagagcggcaagaatagcacctacgagacactgtacctgcggagcaaagccgctcaggacgagatctctctgaaggacctggccagagtgctgctgagcatcaacaagaagagaggctacaagagcagcagaaagaccgattctggcgaggacggccagctgatcgatggcatgtctattgccaaagagctggccaagacaggcaagacccctgccgaatttgccctggaatccatcaagtccggcaagagcggaaagttcgacttctacagaagcgacctcgagaaagagttcgaccggatctgggattgccagcagagcagctatcctgagctgctgaccgacgagttcaagagccagctgagcaagatgaacaagaccggcgccaccaaggcctttttcgccaagtacaagctgaccaccgccgagaacaaaggcaaggacagactgcggaatagcctggaatggcgggtgtcagccctgaaagagcccctggacaaagaaaagatggcctacgtgatctgcgagctgagaggcgccattcagtctagctctggctacctgggcgacatcagcgaccggtctaaagagctgtacttcaatcaagagacagtgggccagtacctctaccggcggatcaaagaagagaaaggcttcagcacccggaaccaggtgttctataggcaggactacatcgatgagttcaacaccatctgggccacacagagcgccttccatccagagctgaccgatacactgaagcggaagatcgccgaccgcatcctgttttaccagcggcctctgaagtcccagaagggcctgatcagcttctgccagttcgagagcagacccatcaaagtgatcatcgacggcaaagagaaaacccggaccaccggatctaaggtggcccctaagagcagccctctgttccaagagttcaaggtgctgcagatcctgaacaacgtgaccatcaaggaccggcggaccttcgattctagaggcctgggaaaagaagaaaaagagtccctggccgccacactgcggatcagggaaaagatgaagggcagcgacgccctgaagcagctgggactcgaccctagaagatacgacctgaactacaaagaactcgagggcaacagcaccctgttcagcctgttctccaagtacatcgagatcgtgaacctggaaaagaacagcgagtacgagctgcagaagatggcttacgagaaggccctggaagtgatccgggacaccttcaacaagctgggctgccacagcgacatcttcaccttcaatagcgacctgcctaaagaagagtacgaacagcagcccatcttcaagctgtggcatctgctgtactcctacgagggcgataagagcgtgaccggaacagcctctctcgtgcggcacatcatggatatctctggcctgcctgagcctcagagcaagattatcgccggcgtgtcctttaacaacaactacgccagcctgagccacaaggccatcaagaaaatcctgccttacatgaaggaaggccaccagtactccgatgcctgtgccatggccggctacaaccacagcaatagcctgaccaaggccgacatcgaaaacaaagtgctggtggactctctggcccagctgccaaaaggcgcactgagaaaccccgtggtggaaaaagtgattaaccagatgatcaacgtggtcaacgccgctgccgaggcctatggaaagcctgatgagatccacatcgagctggcccgcgagctgaagtctagcgccaaagaaagagagcaggccaccaacggaatccaggccggcaacaagcggaatcaagaaatcgagcagatcctcaagagcaagttcaacatccagcagcctagcaagaacgacatcctgagatacaagctgtacgacgagctgaaagagaacgggttcaagaccctgtacagcaacaagtatatccccgagagcgccctgtttagcaaggacatcgacatcgagcacatcatccctcaggctctgatgttcgacgacagcttctccaacaagaccctcgagtacaaggatatcaatatcgagaaaggccgcaccaccgccaacgacttcgtgaaggctaagtacggcgacgagggctacgcccagtactgccagagaatcgagtacctgtactccaagggcgtgatctccaacgccaagcggaagtacctgctgatgaccgaggccgatattcccaccggcttcgtggacagagatctgagaaacagccagtatatcgccgtgaagtcccgcgagatcctggaagattacgtgaaggtggtggtgcctaccaccggcagcgtgacagatagactgagacaagagtggcagctcatcgacgtgatgaaggaaatcaactttgccaagttccggaccgccggcaagacctacacagccatcgatagcgagggccgcaagaccgagaagatcaaggattggaccaagagaaacgaccacagacaccacgccatggacgccatcacaatcgcctttaccaagcctcagcacatccagattctcaacaacctgcgggccaagtgcgacagcaacgaagagtttagacagctgctggacagccagaccaccgacaccggcaagaagaggatcttcacccctcctatgccactggaccagctgagagccgaagtgaagaaacacctggatgccgctctggtgtccatcaaggccaagaacaaggtcgtgacccggaacgtgaacaagatcaagcaggcaggcggcatcctgcggaaaaccgaacttacacctagaggcgccctgcacaaagagcaggtctacggcaagagaagagtgtacgaagtgttctacagccccgtgaacgccaagatgaccgaagaggccattgccatggtggcctctccaaaagagaaagaagccctgctggccagactggccgagtttggcggagatgccaagaaggcctttaccgggaagaacagcctggacaagaaccctctgtatgtgggcgccgagcagattcccgccaaagtgaagtgcgtgcggtttaaggacatctacagcatccggaaagagctgagccccgacctgtccatcgacaagattctggataagggcgttaaggccaaggtcgaggaaaggattcaagagttcggaggcgacgtgaaggccgccttcgccaatctggatacaaaccccatctgcctcgacaacgacaagacaatccccatcaagagagtgaccatcggcgagaacttcgacctgaccgccatccggaacaagcacgacaaggatggcagactgattctggacaagtctggcaaccccattcctagcgactatgtgaacctgcgcaacaaccaccacattgccctgtacatcgacgccgacggaaatgtgcaagaggccgtggtgccaatgttcgaggccctgaaccggatcaacatgcagatccctgtggtggataagaactaccactccgacctcggctggacctttctgttcagcatgaagatcaacgagatgttcgtgttccccgacaagaataccggcttcaaccccaaggacattgacctgctggaccccgccaatagcagcctgatctccccacacctgttcagagtgcagaaactgagcagcaaggactactacttccggcaccacctggaaaccacaatcggcgacgacaacagcctgagagacatcacctggaagagaatcaagaccatccagctgatggccgacgccgtgaaagtgcggatcaaccacatcggaaagatcgtggccgtgggcgagtatgactga

SEQ ID NO: 2020 - DNA, 3678 bp, Artificial Sequence
  OMNI-126 codon optimized for human cells
atggaaaacgtgatcaagcagagaatcctgggcctcgacaccggcacaaattctcttggatgggccgtcgtggatagactgcctctcggaggatacgagctggtggataagggcgtgcagatcttccaagagggcgtgaacatcgagaagggcacccaagagaagtccagagccgccgagagaacaagccacagaagcctgagaaagctgtactggcggcggaaagtgcggaagatcagactgctgacagtgctgagcaatgccggcctgtgtcctagcctgacatctcaagagctgagagcctggcggatgaacggcaagtaccctctgaacaatatcgccttcatgcggtggcagctgaccgacgagcagaagggcatcaatccttacgccgccagatgcagatgcgtggaagaggaactggacatgagcagccccgacaacagatatctcgtgggcagagccatgtaccacattgcccagagaagaggcttcctgagcaaccggaaggaccagaccgacgacaaggacaaagaatctggcgccgtgaaggccggaatcaaagagctgacacagaagattcacgacgccggctgcgagtacctgtgccagtacttttaccagctgtaccagaagggcgagagaatcagaagctgctacaccgaccggaaagagcactacgagcacgagttcgatgccatctgtgccaagcagcacctggatgagtctctggtgcagcagctgagaaaggccatcttcgagcagaggcccctgaaatctcagcggagaggcgtggccaagtgtccctttgagccttctaagcactgcgcccctgtgtctcacccactgttcgaagagttccggatgtggtccttcatccgcaacatcaagatgcagacccctgaggacgccgagctgagaatgctgaccaacgaagagatcgacaaagtgaagcacctgtggttccggaagtccaaggccaactttccattcgaggatatcgccaagactctggccggcaagggcaagtactgttactacaagagcgccgaggataagccctaccggttcaactactacatggacacctctgtggccggctgtcctgtgtctgctcagctcagagatgtgttcggcgaggacctgctgaaggatagagcccaggtggactctatctggctggccctggatttcttcgacgacgacctgaagctgagagagtgggccatcaagcactacaacctggccgatgagcaggccgacgcctttgtgaaaattagactgccacagggctacgccagcctgagcctgaaggccatggaaaacatcgtgcccctgatgcgcgaccacggcatgaactatcctaatgccacactgctggccaagctgcgggacctgaccaaggattaccccttcgagaaggacttcgacgaggacgtggaagcctatctgaaggccgacatcgaggaatacctgacaatccccaccgacaagaatggcaagcctctgatgtcccgggaagagagaaaagaggccctggacgtcaagtggatgcagcactataatctgagcgccaaagagatcaagaagctgtatcaccccagcatgatcgaagagtacagacacgtggaacacaccaccaacggcgtgtaccagctgggctctcctagaatcagcgccctgaagaaccctatggccatgcggagcctgttcagaatgaaggccgttgtgaaccagctgctgaaagacggcaccatcgacgagaacaccatcatccacatcgagttcgccagagagctgaacgacgccaatagacgggccgctctgagaagatatcaggctgccctgcggaaagagagagaggacgctgttgaggccatcaaagagttcatccccaatcctagcgacgacgatgtgctgaagtacctgctgtggaaggatcaagagggcaaatgcgtgtacaccggcaagagcattagcctgagcgccctgtacaatggcaccgagtttgacatcgagcacaccgtgcctagatccatgggcggcgataccaccagagagaacctgaccatctgcgacgccaagttcaaccgggaaatcaagaagaaccggctgcctagccagctgagcgaacaggcacaagaactgctgcaggccaacatccagacctggaaagagaactgcgaagccctggacaagcagctgcgcaagatgaagaatgccaccagcggcctgtccaccaaagaggccaaagactccgtcattgccaagcggcatctgctggaaatgcagcgggatttctggcggaacaagtacaaggccttcacaatcgaagagaaggacgtgcagggcttcaccagaaggcagggcacagacatcagcgtgatctccagatacggcagactgtatctgctgtccctgttcaacagagtggacgtggtcaagggcagcatgaccgccgcctttagaaagatctggggcatccagacagcctacgagaagaagaacagagaaaaccacgtgcaccactgcatcgacgccatcacaatcgcctgcatgggcaagagagagtacgacgagctgagcgcctactaccacgccgacgaggaaaacaagtaccacagcagcgacatcctgatgccaaagccttggaaaaccttcaccgaggacatcaaggatatcgagcaagagatcctggtggcccactacaccagcaatcctatgggcaagcagaccaagaagaagctgagggactccagaggccacatcatcagggatgccaacaagcagcctagattcgcccagggcgatacagctagaggcgccctgcacaacgacatgatctacggcatgatcgtgaacagccagaacgtggacgataagcacaaagtgggcaacctgtgtgccgtgaagcggatcattctgagcagcgtggcctccaaggatgaggaaaagatggccgccagcatcgtggaccccatcatcaaaaagaccgtgaacgatgccagagccaaatacggctctctgtctgccgccatcgaggccgaacaagagaatggcgacggcagcatctggctgaacaaagagaagaacgtcaagatcaaaaaagtgcggtgcttccaggacttcgccatcaacgcttccccaatcagatccctgagggaccagtccaagaaagagtacaagcggagccactactccatgaccaacggcaacttcatgagcgccatctacgagggcaccgacgccaaaggcaagaaaaagcggagcttcgtgatcatcagcctgtacgaagccgctcaggcctacggaaaacacgaacctctggtgcctaccgtgtctgaggaaggctacgccctgatcaagaccatcagactgggagatctggtgctgctgtacgagaacagccccgaggaaatctacaccgccagccaagaggaattggtcaagcggatgtacgagatcatcggcatgagcgacagcaagggactgcagatcaggctgaagcaccagcaagaggccagacctaatggcgagctgcagcagatcaacggcgccttcaaaaatggcgacagcgcccctatccggatgctgctgcatacccagttcaatgccctggtgcagggccaagacttcgacatctccgacacaggcaagatcaccttcaagtcctgctga

SEQ ID NO: 2021 - DNA, 3324 bp, Artificial Sequence
  OMNI-127 codon optimized for human cells
ggaaagctggtgctgggcctcgatatcggcatcacatctgtcggctacggcgtgatcgacatcgacaacaacaagttcgtggattacggcgtgcggctgttcaaagagggcgacagcaacgacaacgagaagcggagaagctacagaagcggcagacggctgcggcggagaaagaagaacagactggacgacatgaagtccctgctgctgtctgccggcatcctgaccaaggactacaagcccctgaacaacatctacgagatcagagtgaagggcctgaccgagaagctgaccaacaatgaactggccgctgctctgctgcacatcaccaagaatagaggcaccaccgtggaagccctggaaaccgccgatgctgacaaagaagccgccggaacaaaggacgtgctggccaagaatgccaaggacctggaacagttcgagtacgtgtgcaaggtgcagctgtaccggctcgagaagtacggcaatatccggggcaccgagaacaacttcaacaccagcgactacgtgaaagaggccagagccatcctgaagtgccaggacatcgacgtggaactgagcgagagcatcgtgaacatcatcagccggcggagagagtactacgaaggccctggaagcgagaagtcccctaccaaatacggcagatggatcgagaagggcgccgagcctatcgacctgattgagaagatgcggggcaagtgcagcatctaccacgatgagctgagagcccctaagagcagctacagcgccgagctgttcaacctgctgaacgacctgaacaatctgagcatcaacggcgagaaactgacccagaacgagaaagagatcgtcatcgaggaagtgaacaacaacggcaagatcaccatcgacaagctgaagaagctgctgaacatcaacgacagcaaggacgtggtggaaggcttccggatcaacaagagcaacgagctgctgctgaccaatatggctatgtacgaccagttcaagaagatctttgacaagcacaaagaggacgcctaccagcgggacaagtacatcatcgaccagatcgccgagatcaacaccgccaagaagggcatcaaagagagatgcgacgccatcgagaagcagttccccaacttcgactacaacctgatccgcgacctggccgagatgaagaagatgacccagtaccacagcctgagcctgaaggccatccgggaaatcaacaaagagatgatcaagagcccgtacaaccagatgcaggccatccatgaactgggcctgcagcactacagaaagtcctacaagggcatgaagaaaatccaggtggacgaggaagccattctgagccctgtggtcaagagagcccagcgggaaaccttcaaagtgatcaacagactgagagagatctacggcgagttcgagagcattgtggtggaaaccaccagggacaagaactccaaagagaagaaagagcggattaacaagacccagaagtattacgaggaccggaacaagaaagtggacgaactgctgaaagagagaggctacaaccccgacaccattaacaacaagaccaagatgaaggtcaaactgtacctggaccagaacggcaagtccgcctacaccatgacacccctgaagctgaacctgatcatcaccaatcctcacgcctatgagatcgaccacatcatccctctgtccatcagccaggacgacagcttcaacaacaaagtgctgatcacccacgaagagaatcaagtcaagggcaacaagacacccatctacacctacctcaacaaccagtttaagaactgcgatatcaacaagtacaaagaaagcgtgaagaacaaccacaacttcagccggaagaaaaagttctacatgctgtacgagaaggacatcacgaagtacagcaacatgaaggagtttatcgcccggaacctggtggacaccagctacgcttctagagtggtgctgaacaccctgaccagctacttccgggacaacgacatcagcaccaacgtgcacacaatcagaggcagcgccaccagcctgtacagaaagagaatcggcctgaagaaggaccgcgacaaggatttcctgcaccacgccattgatgcactgatcgtggccagcatcaagaagcagagcatctttcggaagtacctgatcaagtacaacctcagcgagctgtacaacgaaaagaccggcgagctgatcaaggtggaagaggactctaaagtgatcgaccccgtgttcatcgagttcatcagcaacctcaagacaatctacgagcagagctaccagtactacaacggctacatctctcggaacaaaatgaagttcaagcccatcaagatcagccacaaggtggacacaaagcccaaccggaagatcagcgacgaaaccatctacagcacccggaacgtgaacggcgtggaacgggtcgtgaagaaagtgaaggatatctacgaccccaagttcgacaaactgaccaacgatatcatcaacaatcagtatcacaacaagtggatcatggccgagaaggatgagcagaccttcgagatcatcaagtccatcgtgatggcccacttcaatacctacaaagaagataaggacatctacaagtccaagagcaagaaaggcgtgaccacatggtccctgaagggcagcaacaaccctctgagccagtttaaagaggaacacgggaagatccgcaagtactctaagaaaggcaacggccccgagatcaccagcatgaagtactatgaggacgagctgggcaaccacgtgaacattaccaaaaagtacaacgtggacaacaagaacgtggtcctgctgcagatcagcccctacagaaccgacttctacgtgtcccctaagggcaagtacaagtttgtgaccatccggtactgcaacgtgttctacaaagagagcaacaagaagtatctgatcgataagaagtggtacgaagaggaaaagaaaaagaagaagatcgacgactcctaccagttcgtgtgctccctgcaccatgatgagatcctgggcgtgaagctggaagatggcaagccctacatctatgacgagtccaacgagaacgacgagggcctgaaaagataccacaagggccagtacgagattctgaagttcaccgccaccaacgacgacaagaagaatatcatcgagatcaagcccacgtacacctactgccagaagcagctgaagagaagctgcggcaccttcatcaagctgactaagttcgccaccgatgtgctgggcaatatgtacgaagtgaaagacaacgtgctgaagctcgagttcgac

SEQ ID NO: 2022 - DNA, 4014 bp, Artificial Sequence
  OMNI-131 codon optimized for human cells
atggtgcaggactactacctgggctttgatctcggcacaggatctctcggatgggccgtgaccgacgagaactatgagattctgagagcccacggcaaggccctgtggggcgttagactgtttgagtctgccaagaccgccgaggaaagacggaccttcagaaccagcagacggcggctgaacagaagaaactggcggattgagctgctgcagggcatcttcgccgaagagatcaacaagatcgacgacggattcttcctgcggatgaaggaaagcagatacctgcctgaggacaagaagaacaagagcggcggagtgcctcagctgccttacgctctgttcgtggacaagaactacaccgacaaggactaccaccggcagttccccaccatctaccacctgagaaagtggctgatggaaacaaaagagatccccgacatccggctggtgtacctggccttccaccacatcatgaagcaccggggacactttctgctgagcggcgacatccgcgagatcagagagttcaagaccaccttcaagcagttcatcgaggtggtcaagaacgaggaactggacttcaccctggaaatcgaggaagaacagtaccccaacgtggaacagatcctgaagaacaaccagatgacccggaccgccaagaaaaccgagctgatcaagtctctgaaggccgcctctggctgtgaaaaggccctgctgaatctgatcagcggcggcacagtgaagctgagcgacatctttggcgacaagcagctggatgagagcgagaggcctaagctggccttcagcgatatcggctacgatgagtacgagggcgagatccagtctgtgctgggcgagcagtacatcatcattgagcacgccaaggccgtgtacgattgggccgttctggccgatatcctggacggacaggatagcatctctgccgtgaaggctgccctgtacgagaagcacaaggccgacctggtgtatctgaagaagctggtcaaagagaatctgcccgccaacatctacaaagagatcttcaccaagaccgaggaaaagatcagcaactacagcgcctacatcggcatgagcaagaagaatggcaagaagcaagagatccagggcaagagatgcagcaaggacgacttctacaagtacctgaagaaacaagtgatcgagcggatcaacgacgagaaagtgaccgagtacctcaaagaggaaatcgaccggggcaccttcctgcctcggcaagtgatcaaggacaacagcgtgatccctcaccagatccacctgtatgagctgaaccagatcctgtccaacctgcaagagcacatccctctgctgaaagagcagggcgagaagatccggaagatctttaccttccggattccttactacgtgggccctctgaacggcgtggaaaagggcaaagagcggaccaactgggtcaagagaaaaggcgagggcaagatcagcccctggaacttcgaagagattatcgacgtggaagccagcgccgagcagtttatcagacggatgaccaacaagtgcacctacctgatccacgaggacgtgctgcccaagtacagcctgaagtacagcaagttcatggtgctgaacgagctgaacaacctgagactggacggcgagcctatcagcgtggaactgaagcagaaaatctacctggaagtgttccagcggaaccgcaaagtgacccagaaaaagctgaaggattacctcatcagagagggaatcgccgccaagacagtggatattacaggcgtggacggggacttcaagagcagcctgacagcctaccacgacttcaaagaaaagctgaccggcgtgaagctggaagaggaagagaaagagtccgtcatcctgaacgtgaccctgttcggcgacgacaagaagctgctgaagaagagactgaagggcctgctgccacagctgtctgatggacagctgaccagcctgtgcaatctgccttatagaggctggggcagactgagcgagaagttcctggattctatcgtggcccctgctcctgagacaggcgaagtgtggacaatcctgagaggcctgtgggagagcaacgacaacctgatgcagctgctgtccgagaagtactacttcgccgacgccatcgaagaggaaaacggaaaagagggctgtaaagagatcagctaccagctgatccaagagctgtacgtgtcaccagccgtgcggagacagatttggcagaccctgctgatcgtgaaagaactgtgcaaggtgctcggcggacctcctaagagggtgttcgttgagatggcccgggaaaagacagccaagggcagaacccagtccagaaagtccagactgctggaactgtacaagaagtgcaagaccgaagagaacgagtgggtcgaagaactgaaccacaccgatgagagcaccctgcggggcgataagctgtacctgtactacgtgcagaaaggccggtgcatgtacagcggcgagagaatcgaactgtccgagctgtgggacaaccagaagtacgacatcgaccacatctaccctcagagcaaagtgatggacgacagcctggaaaaccgggtgctcgtgaagaaggtgtccaacgaagagaagtccgacagataccccatcagcgagaacatcagaaagaagatgcagcccttctggaagtccctgctggacggcaacttcatcaccaaagagaaatacgagcggctgatccgggccaccgagtttgaaccagaagaactcgccggctttatcgccaggcagctggttgaaaccagacagggaacaaaggccgtggccagcatcctgaaacaggtgctgcctagcgccgaaatcatctacgtgaaggcccctaccgtgtctcagttccggcaggatttcaagttcgtgaaagtgcgcgagatgaacgacctgcaccacgccaaagacgcctacctgaacatcgtcgtgggcaacgtgtacttcgtgaagtttaccaagaacgccagctggttcatcaaagagcaccccggcagaagctacaacctgaagaggctgttcctggccgacagagtggaaagaaatggcgaaattgcctgggtggccggcgagagcggaacaatcggaaaagtgaagcggaccatggaaaagaacaacatcctggtcacccggcggagctatgaagtgacaggtggcctgtttgatcagcagctgatgaagaaaggcaaaggacaggtgcccgtgaagggctctgacgagagactgagagatctgcagaagtatggcggctacaacaaagagtctggcgcctacttcgtgctggtggaaagcgaggacaaaaaaggcagaaagatccgcaccatcgagtacatccccatcagactgaagtccaagatgaagcaggatgaggaactctactgctacctcgaggaacagcggggcctgaagaatcccaaggtgctgctgaacaaaatcaagaccgacacactgttccaggtggacggcttttacatgtggctgtccggcagaaccgagaacagactgatcttcaagggcgccaatcagctcctgctgcctccaaagaacgtggaaacactgaagaaagtgctgaagttcgtcgcccggaagaaagagaacaaagagctgaagattttcagcgccgaccggatcgagaaagagatgctgctggacctctacgacacctttctgagcaagctgcagaaaaccgtgtacggcaagcggctgggagcccaagaaaagaccctgtccgacaagcgggataccttcagggacctcgagattgaggaacagtgcatcgtgctgtctgagatcctgcacatgttccagtgtcagagcggcgccagcaatctgaagctgatcggaggacctgagaacgccggcagcctgaaaatcaacaacgacatcaccaagtgccggcagatcaacatcatcaatcagagccccaccggcatctacgagcaagtgattgacctgcagaaggtgtag

SEQ ID NO: 2023 - DNA, 4047 bp, Artificial Sequence
  OMNI-132 codon optimized for human cells
atgtctatcaagagcgactacttcctgggcctcgacatcggcacagattctatcggatgggccgtgacagaccccgagtaccacatcctgagaagaaagggcaaagccctgtggggcatcagactgttcgatgccgccaatactgccgccgagagaagaaccttccggaccagcagaagaagaatccagcggcggagacagcggatcagactgctgcaagagctgttcgccgaggaaatggttaagctggaccccggcttcttccagagactgagcgatagcgccttctggcaagaggacaagcaagagcagcagatctacagcctgtttacctgcgagaactacaccgacgtggactactacagagagtaccccaccatctaccacctgagaagcgccctgatccaagagaaaaaagagttcgacctgcggctgctgtatctggccctgcaccatctgatgaagcaccggggccactttctgttcaacggcagcatcaacaacgtgaccagcttccacaccaccttccagaccttcgccgactgcctgtacgacgagttcgacatcgagctggaatgcgacagcgaggacagattcgccgagatcctgaaggataagcacgccagaaagaccggcaagtgctctgagctggaaatcatctgccacatcgagaagtccaacaagcagctgaaagaactgttcaagctgatcaccggcatgaaggccagcctgagcgtggtgtttggagatgatgagctggccgagatcgagcacaacaagatcagcttcagcgagagcagctacgacgaagtgcggctggccctggaagatgagattcaagagagaaccggcatcctggacatcttccacgccgtgtattcttgggccatcctggccgatattctggaaggcggcgagtacgagggcaacagctatctgtctgtggccaaggtgtccacctacaagaagcacggcgacgacctgagactgctgagaacactcgtgcgcgagtactgccccgaccactacaagagctttttcagcgtgtccggcaaggacaactactgcgcctatgccggcacactgaagaagaacggcaagaagcagcccatcaagcggtgcagccaagaggacttctacaaggccctgaagaaactgctgaaccagatgcctaccgaccagcctgaagtgaaggatatcttcatcgagattgagaacggcaccttcctgcctctgcaagtgtccaaggacaatggcgtgatcccctaccaagtgaacaagatggaactcgagaagatcctgcagaacgccgaagagtacctgcctttcctgaagaacatcgacgaggaatgcggcaagaccgtgtccaagaagatcatcgacctgttcgagttcagaatcccctactacgtgggccctctgaataccgccaagggcgagaattgctggatggttcgaaaagaggccggcagaatctacccctggaacttcgatgagaaggtggacagagatcagagcgccgagaagttcatcagacggatgaccaaccagtgcacctacctgatccacgaggacgtggtgcctaagaacagcctgctgtactccgagttcatggtgctgaacgagctgaacaatgtgaagattcggagcgagaagctgcccgtggaactgaagcaggccatcgtgctggacctgtttaagaagcagaagcagatcacagggaagaagctgctcaactacctgaacgccaacggctacgacgtgaagaaagaggacctgagcggcttcgacggcaacttcaaagccagcctgtccagctacctgactctgaagaaggtgttcggagaggaactggacaagtacagcgtgcagcagatggccgaggacatcatcctgtggatcaccctgtatggcgacgatcagaaaatgctgcggagagtgatccggaagcactacgagcagcagctgtctgaggaacagatcctgagcctgagcaagctgaagttccaaggctggggcagactgagcagacggttcctgtctgaaatggaaggcgtggactgcgagacaggcgagtgcatgacagtgatgcagggcctgagaaacacccagaacaacctgatgcagctgctgagccagcagttcaccttcatggaactgatcgaggaagagaacgggaactactacgtcgacgagatcacctacgacaacctggtcaaggacatggtcatcagccctagcgtgaaaagggccgtgtggcagacagtgcagatcgtggaagaaatcaagggcgtgatgggatgccagcctaagaaaatcttcgtggaaatggcccgcagcgacgaagagaagaaacggaccgtgtctagaaaggaccggctgctggaagcctacgacgccattaaggatgaggcccggcagtggcaagaagaactgcagaaatactccgacggcgatttcaaggccatcaagctgtacctgtactacacccagatgggccagtgcatgtacaccggcagaaaaatcgatctgtcccagctgaacgacgccaccgtgtgggatagagatcacatctaccctcagagcaagaccaaggacgacagcctggacaatctggtgctggtggatagatccgtgaatgccaagaaaagcgacggcatgctgagccccgagatccagcagagaatgagagccacctggaagtacctgaaagaaaagaagctcatcagcgagaagaagtacgagcggctgaccagagtgtcccctctgacagatgaagaactggccggcttcatcaaccggcagctggtggaaacaagacagagcagcaaagccgtggccacactgctgaagagggtgtacgatgaggccgagattgtgtatgtgaaggccgaggccgtgtctaacttccggcgggataacctggactacatcaaagtgcgggacctgaacgactaccaccacgccaaggacgcctaccagaacatcatcgtgggcaacgtgttccacgagaagtttaccagcaatcccctgcggtggctgaaaaacaaccccaacaccaagtactccctcaaccagatgttcaacttcgacctggaaaagaacggcgtggtcatctggaagagaggcaaggacggctccattaagtgtgtggaagagacactgaagcggaacgacatcctgttcaccagatacgctttctgcaacaaaggcggattcttccaccagatgctgaccgccgctccagaggataagacaaaggccaaaggcctggtgcctatcaagaaaggcatggaaacctggaaatacggcggctacaccagcgtgacccctagccactttatgctggtggccagcaaggataagaagggaaaagagatccggaccatcgagacagtgcccctgtaccggtggaaagagttcaaagagaatcccgacgctctgctccagtactgcagagagttctacggcctgaaagagcccaaggttctgatcccttgcatcaagaagaatgcccggctggtcgtgaacggcttccctatgcacctgaagggctctacaggcaggcagctgattctgcagggtgctgtgcagctgtgcctggataacgagaacatcaagtacctcaagaaagtgacgaagtacctcgagtgcaacgcccagcggagagacaagagaaccctgctcgaagttcgggaagtgaccggaatcaacaaagaggaaaacatccagctgtacgatgtgttcgtggacaagctgagcaacacaatctaccagtacagacccgccaatcctaaggacgtgctgatcaaaggcaaagacaagttcgtcgagctgaatctggccgagcagtgtgtggtgctgggagaagtgctgcatctgttccagtgcaaactgatcggcgccaacctgatcctgatcggagcctctcagcacacaggcatgatcaccaacggcaaaaagatctccaactgcatcagcatcaaactgagcagccagagcgtgacaggcatcaaagaacgcgtgatcgacctgctcaacatctga

SEQ ID NO: 2024 - DNA, 3264 bp, Artificial Sequence
  OMNI-138 codon optimized for human cells
atgaagtacatcatcggcctggacatgggaatcgccagcgtgggatatgccacactgctgctggatgacaaagagcagccctgcagaatcctgaagatgaacagccggatcttcgaggccgccgagcatcctaaggatggatcttctctggccgctcctcggcggatcaatagaggcatgagaagaaggctgcggcggaggcggttcagaaaagagcagatcagagatctgatcgccgagaagggcatcatgaccaccgaggaaatcgacgagatctacaacagcggcaaagagctgagcgacatctacgagatcagagccgaggctctggatcgcatcctgagcaaagaagagttcgtccggctgatgatccacctgagccagcggagaggcttcaagagcaatagaaaggtggacgccagcgacagcaagagcgagtctggaaaactgctgattgccgtgaagaacaacagagagctgctgagcgagaaaggctaccggacaatcggcgagatgctgtacaaggacgagagattcgccgccaacaagcggaacaaggccgacgactacagcaacacctttagcagggccgagtacgaggatgagatcaaccagatctttgaggcccagctggccctgggcaatccttacgccaccgacgacttcagaaagaagtacctggacatctacctgtctcagcgggcctttgatgatggccctggcggaaaaagcccttacgccggaaaccagatcgagaagatgctgggccactgcaccttcgaggaaaacgagctgagagccgtgaaggccagctacagcttcgagtacttcaacctgctgtccaaagtgaacgccatcaagatcgtcggcgaaggcggcaagagaagcctgacagatgccgagagaaagagcgtgatcgccctggcctttgccaagaatagcgtgacatacgccagcctgcggagagagctgaagctgcctgacggcaagttcttcaacatcagctacggcaagggcgacaagagcgccgaggaagtggaaaaaaagaccaagttcgcctacctgaccgccttccacaccttcaagaaagcctacggccaggcctacgtcggctggtccacagagaagaagaatgccctggcttacgccctgaccgtgtacaagaacgacaacaagatcattgcctacctcaccgaccacaacttcgagaaggccgagatcgagattgccctgacactgcccagcttcaccaagaccggcaatctgtctgtgaaggccctggacaagctgatcccttacctggaacagggcatgctgtataacgaggcctgtagcgccgctggctacaactttaaagccgacgacgccagcaagagaatgttcctgcctgccaatgccaaggacgcccctgagctggaagaactgagaaaccctgttgtgcggagggccgtgtctcagaccatcaaagtgatcaacgccgtgatcagagagtgcggcgagagccccaccttcgtgaatattgagatcgcccgcgagctggccaaggacttcaaggatcggaagcagatcgagcgcgagcagaaagagaatcaagagaagaacgagaagctgatggaacggctgcggaacgagttccacatcctgaagccaaccggccaggacctgatcaagctgaaactgtgggaagaacaggacggcagatgcccctacagccagaagcctatcagcattgagaagctgttcgacgtgggctacaccgacatcgaccacatcatcccttactccatctgcttcgatgacacctacaacaacaaggtgctggtgctgtccgccgagaaccggatgaagggcaatagactgcctatgcagtatctcggcggcaagcggcaggacgatttcagactgtgggtcaacagcgcccacctgagaaagcggaagaaggacaatctgctgagagagtcctacaccgaagaggacaagtccggatggaagaagcggaacctgcaggacacacagtacatggccagcttcatgctgaactacctgaagaagtatctggccctgcagcctagcgaccagggcagaaagaatcagatcatctccgtgaacggcagagccaccgactacctgcgaaaaagatggggcgtgcagaagattagagagaacggcgatacccaccacgccgtggatgccgtgattatcgcttgtgtgacccagggcatgatcaagcggatcagcgagtacgccaagtacaaagaaaccgcctttcagcaccccgagacaaaagaatacttcgatgtggacaagaaaaccggcgaagtcatcaacaggttccctctgccttatcctgacttccggaaagaactggacatccggtgcagcgacgaccccattagactgctgagactgtaccctctggtgcagtacagctccggcgaagaggtcaaacccatgttcgtgtccagaatgcccaaccacaaagtgaagggcgctgcccacatggaaaccatcagaggccacttcaaagaggacggcaaggactactctgtggccaaggtgccactgaccagcctgaagctgaagaatggggagatcgagggctacttcaatcccggcagcgacatgctgctctacaacgcccttaaagccagactggcccagttcggcggagatggcaaaaaggccttcagcgagcccttctacaagcccaaggctgatggatctcagggccctctggtcaagaaagtgaagatcgtgaacaagagcaccctgagcgtgccagtgcatggtggaacagctgtggccgataacggctctatggtccgagtggacgtgttctacgtggaaaacgaaggctactacctggtgcctgtgtacgtgtccgacaccgtgaagagagaactgcccaatagagccatcgtggcccacaaggcctacgaggactggaaagagatggacgagaacaacttcgtgttctctctgtaccccaacgacctcattaagctgaccttcgccaaagagatgagcttcagcctgaccaacaagggctctagcctgcctcctgagatgaagtgcaaagagatcttcgcctactacaagggcaccaatatcgcctctggcaccatcggcgtgatcaaccacgacaatacctacggcatcggcagcctgggcatcaagagactgcctcacatcgagaagtaccaggtggacgtgctgggcaacatcaccaaagtgggcaaagaaaagcggatgcggttccggtga

SEQ ID NO: 2025 - DNA, 3282 bp, Artificial Sequence
  OMNI-159 codon optimized for human cells
ggtaccaactacatcatcggcctggacatcggcatcacaagcgtgggatatgccgtgctgatgctgaacgacaacgacatcccctgcagaatcctgaagatgggcagcagaatcttcgagatcgccgagaatcccaaggacggcagttctctggccgctcctagacggatcaaccggggaatgagaagaaggctgcggcggagaagattccggaaagagcagatccggaacctgatcatccagaacaacatcatgaccaacgacgagatcatcagcatctacaacagcggcaaagagctgaccgacatctacaagatcagatgcgaggccctggacagagagctggacaaagaagagttcgtccggctgctgatccacctgagccagagaagaggcttcaagagcaacagaaaggtggacgccagcgactctaagtctgaggccggaaagctgctgaacgccgtgaaaacaaacaagaccctgatggaagagaaaggctaccggaccatcggcgagatgctgtacaaggacgagtgcttcgccgacgtgaagagaaacaaggccgacgactacagcaacaccttcgccagatctgagttcgaggccgagatcaacgccttcttcgacgcccagcagaagttcggcaacgagtacgccaacgatgagatgcgggacagctacctgaagatctacctgtctcagcgggcctttgatgaaggccctggcggcaatagcccttacggcggaaatcagatcgagaagatgctgggcaagtgcaccttcgagcccgacgagtttagaagcgtgaaggccgcctacagcttcgagtacttcaacctgctgaccaaagtgaacagcctgaagctgatcacccctgaggaaaagcggttcctcaccaaagaggaaaaggacaagatcatcaacctggccttcagcaagaaaaccatcagctacgccagcatcagaaaagagctgggcatcctggccgacacctacttcaacatcagctatggcaagggcgacatcacacccgaggaaaccgagaaaaagaccaagttcacctacctgaacgccttccacgtgttcagaaaggcctacggcgacgtgttcctgaactggtccaaggataagaagaactccctgggctacgccctgaccgtgtacaagaacgacagcaagatcgtggactacctcaacaacaagggcttcgacaaagccgagatcgatatcgccctgacactgcccagcttctccaagaccggcaatctgagcatcaaggctctggacaagctgatcccattcctggaacagggcatgctgtataacgaagcctgtgccgccgctggctacaacttcaagaacgatgataccagcaagcggaagttcctgcctgccaacgaggaagatgcccctgagctgggagacatcagaaaccctgtcgtgcggagaagcgtgtcccagaccatcaaagtgatcaatgccatcatccggaagtacggcgagagccccacactggttaatatcgagctggcccgggaactgagcaaggccaagaaggaccgggacaagattgagaagaaccagaaggacaacagaagccggaacgaggccatcgtggaagaactgaagaacaccttccacatcctgcagcctaccggccaggacgtggtcaagtacaagctgtggaaagaacaggacggcatctgcccctatagcctgaagtccatcagcctggataagctgttcgacgtgggctacaccgacatcgaccacatcatcccttacagcgtgtccttcgacgacacgtacaacaacaaagtgctggtgctgagcagcgagaaccggcagaagggcaatagactgcccatggaatacctgaagggcaagaagcgggacgagttctggctgtgggtcgacaacagcaacctgcggagccggaagaagaagaacctgctcaaagaacagatcaccgaagaggacatcagcggctttaagaagcggaacctgcaggacacccagtacatcagccggtttctgctgagctatctgaagaagtacctggaactgcagcccaacggcagcgccatcaagaacacaatcaaggccgtgaatggcgccgctacagcctatgtgcggaagagatggggcatcaacaaaatcagagagaacggcgatatccaccacgccgtggatgccgtggttatcggctgcatcacaaaccccatgatcaagaagatcagcgagtacagcaagtaccgcgagctggaatttgtgaaccctcacaccgacgagattctggatatcgacaccagaaccggcgagctggtcaacagattccccatgccttacgactggttccgggatgagttcatcatgagaaccagcagcgaccccaccagagtgctgcacgagaagcctctgcctaactacgccacagacgaggaagtgtccccaatcttcgtgtccagaatgcccaagaggaaagtgtccggcgctgcccacaaggacaccatcagacggaaatacgtgaacgaagtgggcctcgagtacaccgtgtctaaggtgccactgagcagcctgagactgaagaatggcgagatcgagggctacttcaatcccagctccgacatgctgctctacaacgccctgaagtctcggctggctatgtacgatggcgacggcaagaaggcctttgccgacagcaccgagcctttcagaaagcccaagcacgatggcacagacggccctatcgtgaagaaagtgaagattcagaacaaggccacactgagcgtccaggtgcagaacaagaccgccattgccgataacggctctatggtccgagtggacgtgttcttcgtggaaaacgagggctattacctggtgcctgtgtatgtgtccgacacagtggccctggatctgcccaatagagccatcgtcggcggcaagccctactccaagtggaaagagatggacaacgataacttcgtgttcagtctgtaccccaacgacctgatcaaagtcaagtccaagcgggacatgaagttcaacctggtcaaccccgatagcaccctggccaagaattacaccgccagagaatccatgctgtactacaagggcaccgatatcagcaccgccgccatcacagccatcaaccacgacaacacctacaagctgagaggcctgggcgtgaagtccctgctgtctatcgagaagtacagcgtggacgtgctggggaacaagacgaaagtcaacaaagaaaagcggatgggcttcgtgggatcc

SEQ ID NO: 2026 - DNA, 4191 bp, Artificial Sequence
  OMNI-169 codon optimized for human cells
ggtaccagcaagatcctgggcatcgacctgggcacaaatagcatcggcctggccatcagagacaccgacaagggcgagacattcgtggaacaggtggacttcttcagcagcatcatcttcaagagcggcgtcggatctggacaggccggcgaattttcttacgccgccgagaggaccaagaagcggagcatcagaaggctgtaccagagccggaagtacagaatctggaccacactggccctgctgatcgagaatggctactgccctctgagcatcgaggacctggataagtggcggagatacgacaaagagaagggcctgaagcggcagtaccctatcgaggccattcagttcgagcagtggatcagactggacttcgatggcgacggcaagcccgactacatcaacccttatgagctgcgggccgagatcatgcagaagcagttcgacttcaacgaggaaatcaaccggtacaagctgggcagaatcctgtaccacatcacccagcggagaggcttcaagtccagcaagggcgaaaccctgaaagagctgagcgagaacgagatcaatgaggatctggatctgagcgtggccctgcagaagtccgaggaaaagaagtcccagaaactgaaggatttcatgaaggaacacaacatccccaccgtcggctgggccttttacgagctgaccaagagaggcatccggatcaaagagtccgagtaccaggccgtgcgcatccagtacaaagaggaaatccagaagatctttgagttccaagaaggcctggacaccaccagcgacttctacaagcacctgatgtccgagaagaaaggcgagggcaccatcttttacaagcggcccctgcggagccagaaaagcaaagtgggcacctgtacactggaaaccggcaagagcagatgccccatctctcaccccgagttcgaagagtacagagcctggtccttcatcaacaacatcaagtaccggaccagcaccaccgccgagtggaaaacactgcccctgaacctgaagcaagagctgttcaaggacaagttcctgcggaccaagagctacttcaagtttgaagagatcaagaactggctgagcagcaagctgtgcctgcagctcgagtacaccaacaagaaagagacaagcaccatcaactacaaggataagaccaacgtcgtgggctgccccatcagcgccagactgaagaatatcctgggcgaagattacaagcagtggaagttcaactctgacaaagagcggaccaatagaaagaccggcgaggtgcaccggatcacctacgactatctggatatctggcacatctgcttcagcttcgacgaggccgagttcgtggaagagttcgccaagtgcaccctgaagctggacgacaagcaggccaagaagctgtgtaccctgcacaacaatatccagcaagagtacgccagcctgagcctgaaggccatccggaatatcaacccattcctgcagaaaggcctgatctacaccgatgccgtgctgctggccaagctgcccgagatcttcaaagacaagtggaacgaggtcgagaacgacatcgtggccgccatcgacgacatcatcaaagagaacagatacgagaagggcatcctggacatcgtgaacgacctgatcgccaattacaagagcctggactacggcgagagattcgccgagcacaacaccgagtacatcctgcagagccaggattacaccgacatcgagagcaagctgaagggccactttggcgagagaacctggaatgccaagccttgcgaggaacaagaacagatcagaaaggacgtgcgcgagctgtatcagatcttcttcggcagctccagccggggctactttaagcagcctaaggtgtccgagagcctggccgagtacctgaagaagcagtacacctacctgaacgacgacgacctgaaaaagatctatcaccccagcatgatcgagttctaccccaaagtgaagcccacactgctggacgataacaaatacgtgaagctgctgggcagccctgtgatcggagccctgaaaaaccctatggccatgagaatcctgcacaccctgagaacccagatcaaccagctgatcaaagaaggcaagatcgacgagtacacgaagatcgtggtggaaaccgccagagaagtgaacaacacaaacaagcgctgggccatcgaggaataccagcgcaagcaagaggaagagaacaaagaggttgagaagatcatccggcagtactaccagaaggacaacatcagcgacgacgagattaagaaggccaaaatcctgctggaccagttcgacgtggaaaaggataacaagcaagaaaagaagcaggatacccagagcgacaagctgtccgacacctggtctaaagtgaagtccaacaacattaagcgctacaagctgtggctggaacagaattgctgctgcatgtacaccggcaaagtgatcagaatcagcgagctgttcgacaacgacaagtttgacatcgagcacacaatccctcggagcatctccttcgacgacagcctgtccaacctgaccatctgcgacagccacttcaaccggtccatcaagaagaatcagatccccactcagctggacaactacaatgagatcaagtctcggctggaactgtggaagcagaaagtcaagtctctgaaagagagggtcgagtactggaaagagcagagcaagatcagccagaccaaggaccgcaaggaccagtgcatcaagcagagactgctctggcagatggaactggactactgggagaagaagctggcctccttcaccatcaaagagttcatcgacggcttccggaacaatcagctgaacgacacccggatcatcaccaaatacgccttccactacctgaaaaccgtgttcgagcacgtgtccgtgcagagaggcgagatcaccagcaacttcagaaagatcgtcggcatccagaaagaggacgagaagaaggatcggagcaaccacagccaccatgccatcgatgccgccatcctgacactgattccctccgccaagcagcggaatagaatcctggaaaccttctaccagatgaaggaaagcaaagagactaacaacaaggacaaactggaaaagaccaccaaagagctggaaaaggccaagagagccgctctgattcctaacgccgtggccgctatcaaggaccacattgagcagaacatcttcgtgaaccacatcagcaaggatcagacactgacccctgccaagcggagaaagagaatccggggaaagatcgacaagaacaaacagtggattatcaccggcgactgcatccggggcagcctgcacaaggatagcttctacggctgcatcctgatcgacggcaaaaagtacttcgtgatcagacgggccctgaagtacaaggccaacgataaggacaagggcttcaagacctggaacgaactcgagaatgccattgtggacaaggccctgtacagacggctggtcaagcctttttgtcaagagggcgccgaggaacccagcatcgactttaagaccgtgatgctggaaaaaggcggcctgtacgacaacggcatcaaagtgcggcacatccggtgctataccagcgtgaagaaccctctgcagatcaaaaagcagacctacaagagcaagcagggctacaagaactactactacgccgaagtgggcgatctctacaccatgtgcaaatacgagaacaagaaaaccggggagatcgtgtaccagccttacaacctgttcgaggtggccgcaaaccacaagatcacccacgagtttatcccttctaagtacgacgacaaggtgctgacacagcagctcgtgaagggcgacatgctgctcatctataaggataaccccaacgagctgtttgagatggacaacgtgcagctgagcaagcggctgtacgtgatcgatggcttcgagagaaagtcctgcctgaccaagctgatcaggtcctctaacgcccagcaggacaaagaactcggcaaaggcgagagcatcaaggacttcaacaacctgcctcagaagatccgccagtccatcaacaagctgcactacctgctgcggggcatcgatttcaagatcatcaacggcagaatcgagttcctgaacaagaccaagtactacgacggatcc

SEQ ID NO: 2027 - DNA, 4476 bp, Artificial Sequence
  OMNI-173 codon optimized for human cells
ggtaccaagaacatcctgggcctcgacctgggcacaaattctatcggatgggccgtgatcagccacgacggcatgtgttactctggcatcaagtgcgccggcagcagaatcattcctatggatgccgccaccatgggcgacttcgataagggcgtgacaaagagcagcgccagcgagagaacacagcagagaggcatcagacggctgaacgagagaagcctgctgcggagagaaagactgcacagagtgctggacatcatgggctttctgcccgagcactacagccggaatctgaccagatacggcaagttcatcagcgagaaagtgaagctggcctggaccgacgagggcagatttctgttcgacgcctccttcaacgagatgctgcacgagttcagatcacagcaccccagcctgatggaaagcggcaagaagatcccctacgactggaccgtgtactacctgagaaagaaggccctgagctaccccatcaacaagttcgagctggcttggattctgctcaacttcaaccagaagcggggctactaccagctgagaggcgaagaggatgacgagaaggccagcaacaagcaagaggagtacatgagcctgaaggtgctgagagtggaagatagcggcgagaagtccggcaagtacacctggtacagagtgcacctggacaacggcatgatctacaacagaaagagcaacatccctctggactgggtcggaaaagagcgggacttcatcatcaccaccgagctgaacaacgacggcacccctaagaccgacaaagagggcaacttcaagcggagcttcagaagccccagcgagaacgattggaccctgatcaagaagaaaaccgaggccgacatcgagaagtctcagaaaaccgtgggcacctacatctacgagtccctgctgcagaaccccacacagaagatcagaggcaagctcgtcagagtggtggaacggaagttctacagaagcgagctgaagctgatcctggaaaagcagtgccggttcctgcctgaactgcaggatgctgctctgctgcaggcctgtctggaagaactgtaccctcacaaccggatgcaccgggacatcatctccaacaagggcttcaccagcctgttcatcgacgatatcatcttctaccagcggcctctgaagtccaagaagtccctgatcggcaactgcccctacgagtggcacagctacgtggacaagaccaccggcaagaccaagacagtgtacaacaagtgtatcgccaagtctcacccactgtaccaagagttcagactgtggcagttcctgagcaacctgcggatctacagcaagggcacatacgagcaggacgtgaccaccagactgctgcccgatcaagagagctacgccgctctgttcagctggctgaatgaccggacctctatccggcagaaggacttcctgaactacagcggcttcaagctgaccaagaccgagcagaaaaactaccggtggaactacgtcgaggacaagacatacccctgcaacgagacacacggcgagatcctgaagagaatcctggactgcaacctgcctgagatcttcctgaccaaagaacgcgagctgtccctgtggcacatcctgtacagcgttgaggacaaagaacagtacaagaaagccctcgagaagttcgccgagaagaacagcatcgacagcgccgattttgtggccgcctttgagaaagccaccgccttcaagaaggactacggcagctatagcgccaaggccatctctaggctgctgcccctgatgagaagaggccggttttggagcgaggaaaagatcgataagaacaccctggaacggatcgagaagctgattaacggcgagtacgacgagcagctgtgcgagcaggcttatgaaggcgtggcaggactgagcgacgtgtcacagtttcagggactgcctgtgtggctggcctgctacatcgtgtacaatagacacagcgaggccaccgacgtgtccagatgggagtctcccgatgacatcgacaagtacctgagcgacttccggcagcacagcctgagaaaccctatcgtggaacaggtggtgctggaatgcctgagaaccgtgcgggacatttggagacaagtgggccacatcgacgagattcacgtggaactgggcagagagatgaagaaccccgccgacaagcggaagaaaatgaccgagagcattctggaaaacgaaaaggccaacctgagagccaaagccatgctgatggaactgatgaaccccgagatgaaggtggaaggcgtgcggcctcattctcctggccagcaagagctgttccggatctacgaggaaaacgtgctgaacagcgagaaggtgcccgacgacatcacagagatcctggccaagttcaatcagaccgataacgccaagcggcccaccagcagcgaagtgaatagatacaggctgtggctggaccagaagtacagaagcccttataccggcgagatgatcagcctgagcaagctgtttaccagcgcctacgagatcgagcacatcatccctcagagccggtacttcgacgatagcttcagcaacaaagtgatctgcgagtccgaagtgaacaagctcaagtccaacctgctgggccacgagtttatcaagaagcaccagggcgaaaaggtgcagctgagcatgggcaagaccgtggaaatcctgagcgtggaagcctacgaaaagttcgtgaatgagcactactcctacaaccgcgtgaagaaagaaaagctgctcatggacgacatccccgagaagtttatcgagcggcagatgaacgacagccggtacatctctaagctggtcaaggccctgctgtccaacatcgtcagagaggaaggcgagaaggacgccaccagcaagaatgtgatcagctgtaccggcggcatcaccgacagactgaagaaggattggggcatcaacgacgtgtggaacggcatcatcctgcctagattcatccgcatgaacgagattgataagaccaacagctacaccgccatcaacaccagcggcaatatcatccccgacatgcccttcgagtaccagcggggctttagcaagaagcggatcgatcacagacaccacgccatggatgccatcgtgatcgcctgtgccagccggaacgtggtcaactacctgaacaatagcagcgccgccaaagagagcgaggccggcagaatcgatctgcggaacaagctgtgcaacaagaactacaccgacgacaagggcaattacaagtggatcatccggaagccttgggagacattcacccaggacgtcaaagagacactgcaggacatcgtggtgtccttcaagcagaacctgagaatcatcaaccggaccagcaacagaaccctgcacatcgaggccgataagaagaagctgcagagacagaccaagggcgacaactgggccatcagaaagcctatgcacaaggacaccgtgttcggagaagtgaacctgcagcgcgtgaaagaggtgtcctttaaagaggtgctgaagcccgagtacagcatcgtgaacagggacctgcgcaagaaagtgctgagtctgcaggcaagcggctacgacgtgaagcaaatgatgaagtacttcgagtccgagaaggatgtgtggcaggatgccgacttcaagaaaatcaaagtgcggtacttcaccaagacgaccaacgacagatacttcgccacacggaagcccatcgactccagcttcaacaagaagaagatcgaggaatccatcacggacaccggcatccagaaaatcatgctgcggcacctggaaaacatggacggcaaccctgatctggcctttagctccgatggcctggatgagatgaacaagaatattcgggctctcaacaacggccggttccaccagccagtctacaaagttcggatctatgagaaggccgacaaatacgccattggagagaagggccagaaggccaagaaattcgttgaggccgccaagggcaccaatctgttcttcgccatctacgaaaacgagacagtggataagagcaccggggagatcctgcggaagcggtccttcacaacaatccccatgaacatcgtgatgaatcggctgaagcaggggctgagccctgtgcctgccaatgattgcggcaaggatgccaaatacgtgctgagccccaacgacctggtgtacgtgcccacaaaggatgagctggaaagaggcgtggacggcaccacactggacaaggacagaatctacaagatggtgtcctccaacaactaccagtgcttcttcgtgaagaactccgtggcctctcctatcgtcaacaagatggaattttccagccagaacaaaatggaacgggccgtgacaggcgaaatgatcaaagagatctgcatcccactgaaagtggaccggctgggcaacatcatcaagatgggaggatcc

SEQ ID NO: 2028 - DNA, 4476 bp, Artificial Sequence
  OMNI-174 codon optimized for human cells
ggtaccaagaacatcctgggcctcgacctgggcacaaattctatcggatgggccgtgatcagccacgacggcatgtgttactctggcatcaagtgcgccggcagcagaatcattcctatggatgccgccaccatgggcgacttcgataagggcgtgacaaagagcagcgccagcgagagaacacagcagagaggcatcagacggctgaacgagagaagcctgctgcggagagaaagactgcacagagtgctggacatcatgggctttctgcccgagcactacagccggaatctgaccagatacggcaagttcatcagcgagaaagtgaagctggcctggaccgacgagggcagatttctgttcgacgcctccttcaacgagatgctgcacgagttcagatcacagcaccccagcctgatggaaagcggcaagaagatcccctacgactggaccgtgtactacctgagaaagaaggccctgagctaccccatcaacaagttcgagctggcttggattctgctcaacttcaaccagaagcggggctactaccagctgagaggcgaagaggatgacgagaaggccagcaacaagcaagaggagtacatgagcctgaaggtgctgagagtggaagatagcggcgagaaaaccggcaagtacacctggtacagagtgcacctggacaacggcatgatctacaacagaaagagcaacatccctctggactgggtcggaaaagagcgggacttcatcatcaccaccgagctgaacaacgacggcacccctaagaccgacaaagagggcaacttcaagcggagcttcagaagccccagcgagaacgattggaccctgatcaagaagaaaaccgaggccgacatcgagaagtcccagaaaaccgtgggcacctacatctacgagtccctgctgcagaaccccacacagaagatcagaggcaagctcgtcagagtggtggaacggaagttctacagaagcgagctgaagctgatcctggaaaagcagtgccggttcctgcctgaactgcaggatgctgctctgctgcaggcctgtctggaagaactgtaccctcacaaccggatgcaccgggacatcatctccaacaagggcttcaccagcctgttcatcgacgatatcatcttctaccagcggcctctgaagtccaagaagtccctgatcggcaactgcccctacgagtggcacagctacgtggacaagaccaccggcaagaccaagacagtgtacaacaagtgtatcgccaagtctcacccactgtaccaagagttcagactgtggcagttcctgagcaacctgcggatctacagcaagggcacatacgagcaggacgtgaccaccagactgctgcccgatcaagagagctacgccgctctgttcagctggctgaatgaccggacctctatccggcagaaggacttcctgaactacagcggcttcaagctgaccaagaccgagcagaaaaactaccggtggaactacgtcgaggacaagacatacccctgcaacgagacaagaggcgagttcctgaagagaatcctggactgcaacctgcctgagatcttcctgaccaaagaacgcgagctgtccctgtggcacatcctgtacagcgttgaggacaaagaacagtacaagaaagccctcgagaagttcgccgagaagaacagcatcgacagcgccgattttgtggccgcctttgagaaagccaccgccttcaagaaggactacggcagctatagcgccaaggccatctctaggctgctgcccctgatgagaagaggccggttttggagcgaggaaaagatcgataagaacaccctggaacggatcgagaagctgattaacggcgagtacgacgagcagctgtgcgagcaggcttatgaaggcgtggcaggactgagcgacgtgttccagtttcaaggactgcctgtgtggctggcctgctacatcgtgtacaatagacacagcgaggccaccgacgtgtccagatgggagtctcccgatgacatcgacaagtacctgagcgacttccggcagcacagcctgagaaaccctatcgtggaacaggtggtgctggaatgcctgagaaccgtgcgggacatttggagacaagtgggccacatcgacgagattcacgtggaactgggcagagagatgaagaaccccgccgacaagcggaagaaaatgaccgagagcattctggaaaacgaaaaggccaacctgagagccaaagccatgctgatggaactgatcaaccccgagatgaaggtggaaggcgtgcggcctcattctcctggccagcaagagctgttccggatctacgaggaaaacgtgctgaacagcgagaaggtgcccgacgacatcacagagatcctggccaagttcaatcagaccgataacgccaagcggcccaccagcagcgaagtgaatagatacaggctgtggctggaccagaagtacagaagcccttacaccggcgagatgatcagcctgagcaagctgtttaccagcgcctacgagatcgagcacatcatccctcagagccggtacttcgacgatagcttcagcaacaaagtgatctgcgagtccgaagtgaacaagctcaagtccaacctgctgggccacgagtttatcaagaagcaccagggcgaaaaggtgcagctgagcatgggcaagaccgtggaaatcctgagcgtggaagcctacgaaaagttcgtgaatgagcactactcctacaaccgcgtgaagaaagaaaagctgctcatggacgacatccccgagaagtttatcgagcggcagatgaacgacagccggtacatctctaagctggtcaaggccctgctgtccaacatcgtcagagaggaaggcgagaaggacgccaccagcaagaatgtgatcagctgtaccggcggcatcaccgacagactgaagaaggattggggcatcaacgacgtgtggaacggcatcatcctgcctcggttcatcagaatgaacgagattgataagaccaacagctacaccgccatcaacaccagcggcaatatcatccccgacatgcccttcgagtaccagcggggctttagcaagaagcggatcgatcacagacaccacgccatggatgccatcgtgatcgcctgtgccagccggaacgtggtcaactacctgaacaatagcagcgccgccaaagagtccgaggccggcagaatggatctgcggaacaagctgtgcaacaagaactacaccgacgacaagggcaattacaagtggatcatccggaagccttgggagacattcacccaggacgtcaaagagacactgcaggacatcgtggtgtccttcaagcagaacctccggatcattaacaagagcagcaacaggaccctgcacttcgaggaagggaagaagaagctgcagaagcagaccaagggcgacaactgggccatcagaaagcctatgcacaaggacaccgtgtacggggaagtgaacctgcagaggaccaaagaggtgtcctttaaagaggctctgaagcccgactacgccattgtgaacagggacctgcgcaagaaagtgctgagtctgcaggcaagcggctacgacgtgaagcaaatgatgaagtacttcgagtccgagaaggatgtgtggcaggatgtggacttcaagaaaatcaaagtgcggtacttcaccaagacgaccaacgacagatacttcgccacacggaagcccatcgactccagcttcaacaagaagaagatcgaggaatccatcacggacaccggcatccagaaaatcatgctgcggcacctggaaaacatgggcggcaatcctgaactggcctttagctccgatggcctggatgagatgaacaagaatattcgggctctcaacaacggccggttccaccagccagtctacaaagttcggatctatgagaaggccgataagtacgccatcggcgaaaaaggccagaaggccaagaaattcgttgaggccgccaagggcaccaatctgttcttcgccatctacgaaaacgagacagtggataagagcaccggggagatcctgcggaagcggtccttcacaacaatccccatgaacatcgtgatgaatcggctgaagcaggggctgagccctgtgcctgccaatgattgtggcaaggatgccaaatacgtgctgagccccaacgacctggtgtacgtgccaacaaaagccgagctggaacatggcgttgacatggccagcctggacaaggaccgcatctacaagatggtgtccgccgacagatccaacagccacttcgtgaaagaaagcgtggcctctccaatcgtgaacaaggtggaatttggcagccacaacaagatgcagtgtgccgtgacaggcgaaatgatcaaagagatctgcatcccactgaaagtggaccggctgggcaacatcatcaagatgggaggatcc

SEQ ID NO: 2029 - DNA, 4476 bp, Artificial Sequence
  OMNI-175 codon optimized for human cells
ggtaccaagaacatcctgggcctcgacctgggcacaaattctatcggatgggccgtgatcagccacgacggcatgtgttactctggcatcaagtgcgccggcagcagaatcattcctatggatgccgccaccatgggcgacttcgataagggcgtgacaaagagcagcgccagcgagagaacacagcagagaggcatcagacggctgaacgagagaagcctgctgcggagagaaagactgcacagagtgctggacatcatgggctttctgcccgagcactacagccggaatctgaccagatacggcaagttcatcagcgagaaagtgaagctggcctggaccgacgagggcagatttctgttcgacgcctccttcaacgagatgctgcacgagttcagatcacagcaccccagcctgatggaaagcggcaagaagatcccctacgactggaccgtgtactacctgagaaagaaggccctgagctaccccatcaacaagttcgagctggcttggattctgctcaacttcaaccagaagcggggctactaccagctgagaggcgaagaggatgacgagaaggccagcaacaagcaagaggagtacatgagcctgaaggtgctgagagtggaagatagcggcgagaagtccggcaagtacacctggtacagagtgcacctggacaacggcatgatctacaacagaaagagcaacatccctctggactgggtcggaaaagagcgggacttcatcatcaccaccgagctgaacaacgacggcacccctaagaccgacaaggacggcaacgtgaagagaagcttcagaagccccagcgagaacgattggaccctgatcaagaagaaaaccgagaacgacatcgagaagtctagaaagaccgtgggcacctacatctacgacagctttctccagaatcctacacagaagatccggggcaagctcgtcagagtggtggaacggaagttctacagaagcgagctgaagctgatcctggaaaagcagtgccggttcctgcctgaactgcaggatgctgctctgctgcaggcctgtctggaagaactgtaccctcacaaccggatgcaccgggacatcatctccaacaagggcttcaccggcctgttcatcgacgatatcatcttctaccagcggcctctgaagtccaagaagtccctgatcggcaactgcccctacgagtggcacagctacgtggacaagaccaccggcaagaccaagacagtgtacaacaagtgtatcgccaagtctcacccactgtaccaagagttcagactgtggcagttcctgagcaacctgcggatctacagcaagggcacatacgagcaggacgtgaccaccagactgctgcccgatcaagagagctacgccgctctgttcagctggctgaatgaccggacctctatccggcagaaggacttcctgaactacagcggcttcaagctgaccaagaccgagcagaaaaactaccggtggaactacgtcgaggacaagacatacccctgcaacgagacacggggcgagatcctgaagagaatcctggactgcaacctgcctgagatcttcctgaccaaagaacgcgagctgtccctgtggcacatcctgtacagcgttgaggacaaagaacagtacaagaaagccctcgagaagttcgccgagaagaacagcatcgacagcgccgattttgtggccgcctttgagaaagccaccgccttcaagaaggactacggcagctatagcgccaaggccatctctaggctgctgcccctgatgagaagaggccggttttggagcgaggaaaagatcgataagaacaccctggaacggatcgagaagctgattaacggcgagtacgacgagcagctgtgcgagcaggcttatgaaggcgtggcaggactgagcgacgtgtcacagtttcagggactgcctgtgtggctggcctgctacatcgtgtacaatagacacagcgaggccaccgacgtgtccagatgggagtctcccgatgacatcgacaagtacctgagcgacttccggcagcacagcctgagaaaccctatcgtggaacaggtggtgctggaatgcctgagaaccgtgcgggacatttggagacaagtgggccacatcgacgagattcacgtggaactgggcagagagatgaagaaccccgccgacaagcggaagaaaatgaccgagagcattctggaaaacgaaaaggccaacctgagagccaaagccatgctgatggaactgatcaaccccgagatgaaggtggaaggcgtgcggcctcattctcctggccagcaagagctgttccggatctacgaggaaaacgtgctgaacagcgagaaggtgcccgacgacatcacagagatcctggccaagttcaatcagaccgataacgccaagcggcccaccagcagcgaagtgaatagatacaggctgtggctggaccagaagtacagaagcccttacaccggcgagatgatcagcctgagcaagctgtttaccagcgcctacgagatcgagcacatcatccctcagagccggtacttcgacgatagcttcagcaacaaagtgatctgcgagtccgaagtgaacaagctcaagtccaacctgctgggccacgagtttatcaagaagcaccagggcgaaaaggtgcagctgagcatgggcaaaaccgtggaaatcctgagcgtggaagcctacgaaaagttcgtgaatgagcactactcctacaaccgcgtgaagaaagaaaagctgctcatggacgacatccccgagaagtttatcgagcggcagatgaacgacagccggtacatctctaagctggtcaaggccctgctgtccaacatcgtcagagaggaaggcgagaaggacgccaccagcaagaatgtgatcagctgtaccggcggcatcaccgacagactgaagaaggattggggcatcaacgacgtgtggaacggcatcatcctgcctcggttcatcagaatgaacgagattgataagaccaacagctacaccgccatcaacaccagcggcaatatcatccccgacatgcccttcgagtaccagcggggctttagcaagaagcggatcgatcacagacaccacgccatggatgccatcgtgatcgcctgtgccagccggaacgtggtcaactacctgaacaatagcagcgccgccaaagagtccgaggccggcagaatggatctgcggaacaagctgtgcaacaagaactacaccgacgacaagggcaactacaagtggatcatccggaagccttgggagacattcacccaggacgtcaaagagacactgcaggacatcgtggtgtccttcaagcagaacctccggatcattaacaagagcagcaacaggaccctgcacttcgaggaagggaagaagaaactgcagaagcagaccaagggcgacaactgggccatcagaaagcctatgcacaaggacaccgtgtacggggaagtgaacctgcagaggaccaaagaggtgtcctttaaagaggctctgaagcccgactacgccattgtgaacagggacctgcgcaagaaagtgctgagtctgcaggcaagcggctacgacgtgaagcaaatgatgaagtacttcgagtccgagaaggatgtgtggcaggatgtggacttcaagaaaatcaaagtgcggtacttcaccaagacgaccaacgacagatacttcgccacacggaagcccatcgactccagcttcaacaagaagaagatcgaggaatccatcacggacaccggcatccagaaaatcatgctgcggcacctggaaaacatgggcggcaatcctgaactggcctttagctccgatggcctggatgagatgaacaagaatattcgggctctcaacaacggccggttccaccagcctgtgtacaaagttcggatctatgagaaggccgataagtacgccatcggcgaaaaaggccagaaggccaagaaattcgttgaggccgccaagggcaccaatctgttcttcgccatctacgagaacgagacagtggataagagcaccggggagatcctgcggaagcggagctttacaacaatccccatgaacatcgtgatgaatcggctgaagcagggactgagccccgtgcctgccaatgattgtggcaaggatgccaaatacgtgctgagccccaacgacctggtgtacgtgccaacaaaggccgaactggaacacggcgtggacatggccagcctggacaaggaccggatctataagatggtgtccgccgaccggtccaacagccacttcgtgaaagaaagcgtggcctctccaatcgtgaacaaggtggaatttggcagccacaacaagatgcagtgtgccgtgacaggcgaaatgatcaaagagatctgcatcccactgaaagtggaccggctgggcaacatcatcaagatgggaggatcc

SEQ ID NO: 2030 - DNA, 4335 bp, Artificial Sequence
  OMNI-185 codon optimized for human cells
ggtaccaagaccatcctgggactcgatctcggccctggatctattggatgggccctcgtgaacgtggaaaacggcaagcccaagagcatcatcaaggccggcagcagaatcatccctatggatgccggcgagatgagcgactacgagtctggaaaactgcagagcagcgccagcgtgcggacagcctttagaggcatgagaaggctgtacgagcgggctgccctgagaagagaaagactgctgagagtgctgaacgtgctgggcttcctgcctcagcactaccgggatcagatcgattttggcgagcaccccggcaagttcaagaatcacggcgagcctctgctgccctacagaaagaatgaggccggcaagagcgagtttatcttccagcctagcttcctggaaatgctcgaggacttcaagaagaacaaccctcaggtcctggacgacggcagactgatccctagagactggaccctgtactactgccggaagaaggccctggacagagagatcagcagagaggaactggcctggattctgctcaacgccaacagcaagagaggctactaccagctggacgaggaaaagaccgagaagtccaacgccgagaaagagtatcggagagccaaggtgctggacgtggaacgcctggaagaggacagaaagcagaagggcttctacttctacaagatcacctacgacggcggcctgacacagaccagaaagtgcaagatgcagccttggagagtgggcgacgaggtggacctgatcatcaccacacctctggacaagaatggcaagcctaagaaggacgaggacggcggcatcagacagaccctgtctagccccaaagaggacgattggggcctcgtgatgcagaaaacacaggccggcatcgaccacagcaattgcacagtgggcgagtacatctacaacagcctgctggaaaaccccagcgagaaagtccgcggaggcatcgtgaaaaccatcgagcggcactactacatggaagaactgcggaagatcctggaaagccaggccagattcatccccgagctgtgcgatcacgagctgtacatgaagtgcgtgcgggaactgtaccggaacaacgaagcccacgtgaacgagctgaagcggggcaatatcgtggacttcctgatcaaggacgtgatctactatcagcggcccctgaagtccaagaagtcctgtatcgccgactgtccctacgagagctacacctacgtggacaaagagacaggcgagatcaagaaacggcctctgaaagtgatgcccaagtctcaccctctgttccaagagttccggctgtggcagttcatccggaacatccggatcaccgagaacgagaagatcgtggacggcagaaagtacttcggctacgacgtgacagccaagtacctgggcacacccgaggatgtgtgcagactgtatgagaagctgtccggctacgagaatatcgccgagagcatcgtgctgaagtccctgggcctgaacgccaagatgttcaagtggaactacggcagcaagaaagagttccccggcctgaaaacccaccacgagtttgccacacggatcgccaagctggaaaaggccagagagctgacccagaaagaagagtacaagctctggcacatcctgtacagcgtgtccgaccgggacgaactggaaaaagccctgaagcacttcgccgaggaatgcggctttgacggccagtccttctacgagaagtttaagaccgtgcctaacatgcggggcgactacgcctcttatagcgagagagctgtgaagcggctgctgcagctgatgagatccggcaagtactggaacgagaaagaaatcgacgaggccacactgaagcggatcaacgccatcatcgagtacggctacagcccctacgaagagttcagcgagttcaagagagtggacgacttccagtacctgcagctgtccgatgcctgttacgtggtgtacggcagacacagcgagaacgccgacaacagcgtgtggaacagccccgaagagatcgatgagtacatcggcggcgagttccggaagaacagcatgagaaaccccgtggtggaaaaggtggtggccgagacactgaaggtcgtgcgggacatttggaaaacctacggaaagcccgccgagattcacgtcgagatggccagaagcctgaaggaccccaacgacaagagaaaagaggccaccgagagaatggccgccaaccggaaagagacaatcgacgtccgggaaaagctgcaagagctgaaggatgagcacaaggccgacaatatcaaccccaactccttcatccacatcctgaagtataagctgtggaaagagcaaggcggacagagcccttacaccggcaagtccatctctatcgccaggctgttcaccgacgagtaccaggtggaccacatcatccctcagaagcggtactacgacgacagcttcaccaacaaagaagtgtgcgagagcgccgtgaacctggataagggcgctagactggcctacgagtatatcctggccgaaggcggcaaagaaatcaacgtgaccatcaacgggaagcacgaaaagatcgccatcctgcctaaagaacagtacgaggaatgggtcaagaagcactgcgtcagagagaacggcatcggccggaagggcaagaacctgatgatgacagatgtgcccgccagcttcaacgccagccagctgaacaacacccggtatatcgccagaaagaccgccgaaatcctgagccacatcgttagagagggcagcgatcctggggccagatccaagaatatcatcatgaccaacggcagcatcaccgaccggctgaagaaggattggggactgaagcagatctggaacgaactgatgcagcccagattcgagcggctgaacgataagacccagagcaacgattacggcgaggacgtggtggatgcccacggcaggcactactttcagacaaaggttcccgaaggcctggccgagaagttcgacatcaagagaatcgatcaccggcaccacgccatggacgccatcgtgattgcctgtaccagcctgaaccacatcaactacatgaacaacctgagcggcggagagaaagagagatacgacctgagaagggtgctgtgcgagaaggacagcagagccttcctgaagccttgggagacattcacccaggacagccgcgaggccatgaacaatatcgtcgtgtccttcaagcagaacctgcggatcgtgtcccgggccagcaattactacagccactatgtggatggcaagaagatcatcgagagacagaccaagggcgagcacttcagcatcagaaagcccctgcacaaagccacctattctggactcgtgcggctgccttacacaaagatggaaaagattgagaacaccatcgacaaccccgagcagatcgtcgataagagcatccgcaagggcctgaaagaaattctggtgcagtacaacggcgctgccgacaagaagaagattaagaagtatttcaaggaccgggactacaagctgaatggcgtggacgtggcaaaggtggaagtgcggattgtgcctgaacaggccggacactctgcccatagaaccgtgctggggagcatcaccaatcggaagcagctggacagcatcacagacagcggcatcaagaaaatcctgctgaaccacctggaaaattacggcggcaactacgaggaagctttcagccctgagggcatcagctccctgaacgacaacatcaggcagctgaacggcggcagagatcacaagcccgtgaaatgtgtgcgggtgtccgagaaattcagcctgaagtttcctgtgggccagtccggctccaagatcaagacatacgtggaaaccgagaagggcaccaacctgttcttcgccatctacgtcgacgaagagggcaccagagtgttcgagacaatcccactgaacgtggtggtggaacggaagaaagaccatctgccagccgtgcctgagtgcaatgagaagggcgacaagctgctgttcagcctgtctcctggcgatctggtgtatgtgcctgaggaaggcgagcacattgccatgcctctggaccccaagtgcatctataagatggtgtccgccaactccggcgtgtgctacttcgtgcctcagaacgtggccacacctatcgccgataagatcgagttcggaatcaagaacaagtccgagcgggacctgaacggcaaccagatcaaaaaagtctgcctgaagctcgagacagatcggctgggcaacatcatcaaaatcacaggcaacgacggatcc

SEQ ID NO: 2031 - DNA, 3789 bp, Artificial Sequence
  OMNI-215 codon optimized for human cells
ggtaccaagatcctgggcctcgatctcggcatcggatctgttggatgggccctgatcgagacagacgacagcagaaaccccatccggatcatcgacatgggctgcagaatcatccccgtgtctcccgacgagacaaagaactttgagaagggcagcgccgagacaatcaacggcaagcggaccttcatgcggagcgcccggaagcggaactaccggtacaagatgagaagaagcctgctgaaggccacactgagcgccctgggaatgatcgaccagaaatctgaggtggccctgagatctctgagccccatgcaactgtggcagctgagagctgatgccgccacacctggaaagcagatcacactggctgagctgggcagagtgctgatgcacctgaaccagaagagaggctacagacacgccaagaccgacggcaacgatagcaagcagacacagtacgtgcagggcgtgaaccggaactacgccgatatcaaggacctgggcatgaccatcggccagtaccagtacagcaagctgaaagagagcgagacacacaccgccaagggctgcagtttcgtgatgcaccagatccgggacacagtgtaccccagacaggcctacatggaagagttcgacaccatcatgcaggttcaggcccggtactaccctgccatcctgacagatgaagtgatcgcccggctgcgggatatcatcttcttccagcggcctctgaagtcctgcaagcacctggtgtccatgtgcgagtttgagagccacgtggtgcacaagaaagccgatggatctgccgtgacagtgggacctaaagtggcccctagaacaagccctatcgctcaggccacaagactgtacgaggccatcaacaacatcaccatcgtgaacagcgccaaccggggcaacaaggacgtgaagctgtacgacgaggccgacttcttcaatggcgtggtgcccgtggctctgcggaagaaagattacgtgtaccggctgaacgccgaggaacggcagagaatcttcgactacctgaacaccaacgagaagctgaccgccaccacactgctgaagctgctgggcctgaagaaaagcgacggcttcgtgcctgataaggccatcggcagaggcatcaagggcaatgacacctacgtgcggattgccagcgctctgggcgattaccctggaaaagaggaactgctgaaattcgacctggacatcgtggactccggcgtggtcaatgccgattctggcgagatcctgagcatcgtgtccgccgatgtgatcaagcagcccctgtacagactgtggcatctgctgtactccgtgtccgacaaggatgaactggctggcgcactgggcaagcagtttggcatcacagatcccgaggtggtggatagactgtgcgccatcgatttcgtgacccctggcttcagcaatcggagcgccaagttcatgagaaagctgctgcccagactgatggacggcatcacatatgcagatgccgctggcgccatcggagtgaatcacagcggatctatcaccagcgccgacaatgcccaaagacctctggacgacagactgaaactgctcgagaagaacagcctgagacagcccctggtggaaaagatcctgaatcagatgatcaacgtggtcaacgccctggtcgagagatacggcgccattgatgaggccagagtggaactggccagacagctgaagcagagcagcgaagagagagtgcgggccacacagagcatcagcaagaacgagaaagagaacgccgacattgaggccaagatcagagagttcggcatcagacccagccggtccagaatccaaaagtataagatgtgggaagagtccggcaaagtgtgcatgtactgcggcatcgaagtgaaggacaaagagttcctggaatcccacgacgccgaggtggaacacatcatccccagaagcctgtacttcgacgacagcttcgccaacaagacctgcgcctgccacaagtgcaaccacgacaagggcaacagaaccgcctacgactacatgtctagcctcggcggagataagttcgccgcctatgagcagagagtggacaacctgtacgccgatggcaagatcagcagacggaagcacagctacctgctgatgaagcagtctgagatccccaccgacttcatcgagcgggatctgcggcagagccagtatattgccagaaaggccctggaaatcctgcggggcaccatcagaaatgtgtgggcttctagcggagccgtgaccggcttttttagacacgcctggggctacgacaacatcctgcacgacctgaacgtggacaagtatcagctggccggcctggttgagaacgaggaatatgagcaccggggccagaaacacgtgcgcgctagaatcaaaggctggaccaagagactggaccacagacaccatgccatcgacgccctgacaattgccctgaccacacagggctacgtgcagagactgaacaatctgagcagccagcacggcaacctgttcgacgatctgacccaagagaacgtggaactgcgggacaatagctccctgctgacaaagtgggccgccaccagacctcacttcacagtggaagatgtggccagcagagtgtccgagatcgccatctctctgaaaagaggcgtgcggctggctacaccagccaagcggtatattagaagaggcggcaagagggtgctgagccagactggaattgtggtgcctagaggcagcctgcacgaagagagcatctacggcagaatcagagtgtacgacggcgccaaggcctacaaggacgcctttcagaatccccacctggtggtcaacaacgaagtgcgggaagagatcgagagaagaatcgccgacgccggcaatgacgtggccaaagctctgaaggccctgaaaaagtcccctttcaccgtggtcatcaacggcgagcagcacaccctggacacaatcccttgctaccgcgaggaaatcgtgctgagatacaaggtggacggcctgaaagccaccgacgtgaagtacattgtggacaaggccgtcagagaagccgtggccgagagatatgatgagtgcggcggcaaccagaagctgttccagaactccgtgaacgctgaccccatctgcctgaagggaagccctatgcctatcaagagcgtgcggtgcatgacaggcctgaatgctggatctctggccggcgtgcgaaaggatggctctggaaagatcatcggcctggccaagacaggcgacaaccatcacgtggccttctaccgggacgagaatggcaaagaatgcagcatgatcacctccagatggggcgccatccgcagaaagctgaatggaatccctgccgtggttaccgatcctgccgctgcttgggttcgactcgagtatatcgccgatgaagctgtggccgccgagattgctgcttctcttcctatgcctggctggcagtttatccagagcatgcggcggaacgacatgttcgtgctcggaatgggagatgaggcctttgccgatgctgttgctgccggcgatcagtctacactggccaggcatctgtaccgggtgcagaccatctccaacagcgactacaggtttcggggccacaccgagacaaccgtggatgagagcaacgaggccaaagtgatgaagtctgtgctgagaatccagtcctctggcgcccttgctgccctgacacctagaaaagtgaaggtgtccctgaccggcgagatcatccctctgggatcc

SEQ ID NO: 2032 - DNA, 3654 bp, Artificial Sequence
  OMNI-218 codon optimized for human cells
ggtaccagcaagaagagaatcctgggcctcgacaccggcacaaattctcttggatgggccgtcgtggaccaagaggaaaatggccagtacaccctgatcgacaagggcgtcgtgatcttccaagagggcgtgaagatcgagaaaggcgtggaatctagcaaggccgccgagagaacagaacacagagccctgcggagacactacttccggcggagactgagaaagatcgaggtgctgagagtgctggtcaagtacaatctgtgccccaccatcaccgaagaggacctgaatctgtggaagctgcacaagacataccccagaaaggacgagttcatggtctggcagcacaccaacgacaacgaggacatcaacccctaccactgccggtacacctgtctgaacgagaacctggacctggacagacagcaggaccggtatattctggggagagccctgtatcacatggcccagagaagaggcttcctgagcaacagactggacgccaccgaagaagatgagaacggggccgtgaagtcctctatcgccaacctgaacaaagagatcgaggaaaacggctgcaagtacctgggcgagtacttctacaagctgtacaaagaaaagggcaacaccgtgcggatcagaaccagatacaccgacagagagcagcactacaagaaagagttcttcgccatctgcgagaagcagaacctgcctaaagaaatggtggaagccctgacacgggccctgtacttccagaggccactgaagtcccagagacagaacgtgggcaagtgcaccttcgagaagggcaagcccagatgcagcgactctcaccccacctacgagatctaccggatgctgtccttcctgaacaacgtgaagattcaaggcccctgggacgaagatctgcggcccctgaatgaggaagaactgaagcagatcgataagctgttctaccgcaagagcaagcccaacttcgacttcgaggaaatcgccaagaagatcgccggcaagggcaagtaccagtggaagggcgataccaagaccgacctgccttacaagttcaactacagaatgagccagggcgtgcccggctgtcctacaattgcccagctgaaagagatctttggcgagaactggaaagagaatatcgccgagacatacaccctcaacaccaagaaggacggcacccacaagagcgccgacgagatggtggacgacatctggaacgtgctgttcttcttcgacagcaaggacaaagtgaaagagtacggcatcaagcaccttcagctggacgaggaccaggccgacaagttcagcaagatccggctgagcagaaactacgccagcctgtctctgaaggccatccggtacatcctgccttttctgcacaagggcatgatctacagcgacgccgtgttcttcgctaagatccccgtgatcatcggccagagcctgtggcagaaacggcagcacgagatcatggaagatctgtcctacgccatccatatggccatgaaggaaaagcagcggatcgacgatgccgtgaaggactacctgcagaacaacttcgatctgaagcctggcgccgctgacatgctgtatcaccccagcatgatcgagacttaccccgacgctcagcccgacaaaaatggcgttgtgctgctgggcagccccaggaccaatgccattaagaaccccatggctatgcggagcctgcacgagattcggaaagtgatcaacaccctcatcaaagagggcaaagtcgcccctgacaccgagatccacatcgagtatgcccgcgagctgaacaatgccaacatgagagccgccatccacgacctgcagcgcgagaaggataagaagcacaaagagtacagcgagaacatccggaaactctacaaagaggccaccggcaaggacatcgaggccacagaaaccgacatcctgaagttccagctgtgggaagaacagggacacatctgcctgtacaccggcgacgagatcggaatcgccgactttatcggcgccaatcctagcttcgacatcgagcacacaatccccagaagcgtcggcggcgatagcacccagatgaacatgaccctgtgcaacacccactacaaccgcttcgtgaagaaggcctacattcccacacagctggccgaccacgagtttatcatgacccggatcgagccctggaaagaaaagattgaggatctgaccaagcagatcaaccagatccggaccagcaacatctgggacaaagccgccaaggacgccaagatcagaaagaagaaccggctgctcgaggaactgaagtactggaaggggaagtacgaccggttcaccatgacagaggtgcccgagggatttgccagaaggcaaggcgccggaatcggcctgatttctaagtacgccgctctgtacctgaagtcctacttccacgacacactgcaccccgagcaccgccaggtgtactctatcaagggcaccatcacaagcgatttccggaagatgtggggcatccaagaagaggacgagaagaagtccagggacagccacacacaccactgcatcgacgccatcgtgatcgcctgcatcggcaagaacgagttcaacatgatgggccagtactaccacgtgcaagagaagttcgaaaaaggcgagggcgagaagcccgagttcaagaagccttggcctaccttcacacaggatctgaagaagatcaaagaggaactcgtcgtcgtccacgacacccctgacaacatgcctaagaaggccaccaagaccatcgagatcagcaagggcagaaaggtggtggccaagggcgattgtgccagaggatctctgcaccaggatacctactacggcgccatcgagcgcgacggcaacatcaaatatgtcgtgcggaagcccctgagcagcttcaccagcatcaaggacctggataacatcgtggatgatgccgtgcggcaggccatcctgaatgccatcgagggaaaagacttcaagaaggccctggctgagcccatctacatgaacaaggataagggcatcctgatcaagaaagtgcggtgctacacccctagcatcaccaagcctctgcacatcagaacccaccgggacatcagccagaaagagtataagcagcagttccacgtggccctggacagcaactactgcatggccatctacgagggcgaagtgaaaggcaagaccaagcggacctatgagatcatcaacatgctggacgccgctgcctacttcaaaaagagcagcaacctggccaagcagcaccctatcgctcccgagaacaagaatgagctgaagtaccggtgcagcgtgcacacaggcacacaagttctgctgctgcagagcgacggcgagaatatcaacctggaaaacaaggacgatatcgccagacggctgtaccatgtggccgtgatgagatccgatggcagaatcgtgctgcggtacaaccaggacgctagagatgccaccacactgaagaaagagcgcaagagcggcgcctacaaagtgggcgagcagtacagatccgagattatgctgagcctgagcgacttccacgctctggtggaaggctacgacttcacaatcacccctctgggcgagatcaagctgaagcacggatcc

SEQ ID NO: 2033 - DNA, 4080 bp, Artificial Sequence
  OMNI-231 codon optimized for human cells
ggtaccaacaacaaagagtacttcctgggcctcgacatcggcacaggatctgttggatgggccgtgaccgacacacagtacaacctgatcaagatcaaccggaagtacgcctggggagccgtgctgtttgatacagccaaaggcgccgaagaacgcagagtgaacagatgcgccaggcggagataccagagagagaagcagcggatcaacctgctgcaagagctgttcgaggaagagatctacaaggtcgacagcggcttcttccaccggctgaacgagagcagatacgtgtacgccgacaagcgggatgagaagggcgagaagcctgagctgccttacagcctgttcgtggacgagaattacaccgacgtggactaccaccgcgagttccctacagtgtaccacctgagaaaggccctgatgaccgaggacagagcctttgatgtgcggctgctgtatctggctatcgcccacatcatccggaacagaggccacttcctgagcaacatgggcatggacgaagtgaacctggacttcagcaagatcttcggcgacctgatgaactgctggaaagaaaacatggaagatgagagccggaacagcgtgctggaactggaaaacgagacaatcgagaacatcgagaagatcatgaagaacagcgagctgaccaagaccgccaagaagcagaagattctggaagaactgagcggcttcagcaaagagttcaaagagctgatcgccctgatcaccggcggcaaagtgtctctggccaagctgtttgacaagaaagagtatgacaccctcgagatcgacaagatctgcttcgacgaggccagcttcgaggaaaatgaggaaatctacgccaccaacctggacgactacttcgagatcatcaccaaggccaaggccgtgtacgactggatgatcctgtccaacatcttcaaggacgacaagagcggctacctgagctgtgccaaggtggccgattacgagaagcacaagagggacctgaagaacctgaaagaggccatcagaaacgacagcatcggcgacgaagaggacaagcggaacctgtacaagcagaccttcggcgtgcccaagaaaggcgaggaaaactacagcaagtacatcggcatgaccgccagcaagggcagcaagtttgtgatcgatggcgccaagtgctctaagtacgacttctacaagttcgtgaagaagaacatcatccccaagctgaaggatggcgagctgaaagagtacattgagaaagagatcagcctcgagagcttcatgcccaagaccagagtgaaagagaacgccatcattccctaccagatccacgccaaagaactgaagaaaatcctggaatgcgccgaggcctacatgccctttctgaaagagagggacgactccggcaagaccgtgtctgagaagattatgatgctgctgaccttcagggtgccctactacgtgggacctctgaatactgccagctctcaggcctgggtcaagagaaatggcaccggcagagtgaccccttggaacttcgagacaatgatcaacgtggacctgagcgccgagaagttcatcgagagaatgaccagcaagtgcacctacctcaagaacgagaaggtgctgcccaagagcagcctggtgtacgaagagtatatggtcctgaacgagctgaacaagctgcagatcaagagcgagcccatcagcgtcgagctgaagaacgacatctaccacgacctgttcgagcggaagctgaaagtgaccctgaagaaactggtcgactacctgaagagagaaaagggctacaccgacatcaccaaagaggacatctccggcatcgacatcgacttcaagtccagcctgaagtcctaccacgccttcaagcgcgagttcaccgatgtgaatctgagcgagagcgagaaagaggatatcatcaaggacatgaccctgtttggcgccgagcctaagctgctgaagaagagactgtacgccaagtttcccgactacgagagccagctgaacagcctgattaagagcctgaactgcaacggctggggcagactgagctacaaactgctgaacggaatcgccgtggaaatccccggacaaggcatggtcggaacagtgctgtaccagctgcggaacaccaacaacaatctgatggaaatcctcgagaagtctggcagcccctacgccaagctgatcgaagaggaaaacaagaccgacgacagccacaagatcaattacgagctggtcaaagaactctacgtgtcccctgccaccaagcggcagatttggaaagccatccaggtggtggaagagattagccacgccatgggacaccctccaaagcggctgtttgtggaaatggcccgcgagcacatggaaagcaagcggagcatcacccggaagaacaagttgctggatctgtacaagagcatcaagaatgagaaagaactgtacgaggaactgaagggccagcctgaggataagctgcggagcgataagctgtacctgtactacacccagttcggcacctgtgcctacaccggcaagaagatcgagctgagcgagctgttcaacaacaacctgtacgatatcgaccacatctaccctcagagcaagacagccgacgactccctggacaatagagtgctcgtgtgcaaggacagcaacggctacaagagcgacgtgtaccccatcgacagcgacatccagaaaaagatgtggaacatttggtatctgtggtactccaagggcctgatctccaaagagaagtacaagcggctgacccggacctccgagctgacaaatgatgagctgaccggcttcatcaaccggcagctggtggaaacccggcagagcaccaaagaaattatgaagctgatgcggcagctgctgcccgacacagagctggtgtattctaaggccggcaacgtgtcccggttccggcagaagtataagatcctgaaagtgcgggaactgaacgattaccaccacgccagagatgcctacctgaacatcgtcgtgggcaacgcctatcacctgagattcaccaaggacatccgcaactactttatgaagtacggcacctaccggacctacaatctcaagaagatgttcgagaaggacatcaccttccaagaggaagtcgcttggagagccggcgagagaggaacaatccagaccgtgctgcgcttcatgaactgcgacaaggtgctggtcaccaggcagacctttgagaggaaaggcgccctgttcgacgtgcagcctaagaaaaaaggcgaaggccaggtgccaatcaagtccggcatcaacaacgagagactggccgtgatcgagaaatacggcggctacaatggcgccaccatcagctactttaccctgatcgagggcctgaaaaacaacaagaacaagaagcggtatatcatccccgtgcctctgtacctctgtcacaagattgagaaggacgagctgtatgccaagcagttcttcgaaaaagagagcaagctcagcaacatccggatcattcggaagatcctcatccagacactgatgatcgacgagggcttcaagatgaggctggccggcaaatctggcacccagctgatcttccacaacagcaacgagctgtccctgaacaagaaacacttcaagtgcctcaaagagatcgagaagtttatcctggaccggaaggacaagcccgacgccacaatcaatgagaagtccgagctggccggaaaccagatgctggacatctacaatatcttcatcgacaagctgatgaacagcgtctactctaaagagctgggcaagcacggcgagtttctgaacaacggcctggaacagttcaacaagctgagcctcgaggaccaggccattcagctgcacgagctgctcaagttctttcagtgcacccctgagatgcccgacctgtctagagttggcggctctaagtccatcggcgccatcaggtctagcatggacgtgaccaagagatccaagctggccatcatccaccagagcgtgaccggcatctacgagaagattgagcgcatcaacgagggatcc

SEQ ID NO: 2034 - DNA, 4242 bp, Artificial Sequence
  OMNI-247 codon optimized for human cells
ggtaccgccaagtacagaatcggcctggacgtgggcacaaattctatcggctgggccgtgaccgacctgaacaacaagctgatcatgaagaagggcaagaaactgctgggcgtgctgatgttcaaagagagcagcggcggagacaaggaccctaacaagctgcggagaacctaccggtgcagcagacggcggatcagaagaagaaaagagcggctgaactacctgaacgagatcttcgcccctgagatcaacaagatcgaccccaccttcttcgagcggctggacgagtctttcctgaagctggaagatcggaagtacaaggacaagtacaccctgttcatcgacaagaacttcaacgacaagacctacttcaagaagttcaacaccatctaccacctccagaaatacctgatggaatccgagaagaaagaggacatcagactgatctacctggccatccggcacctgatcaagtaccggggcaacttcctgaacagcagcaaccccgacaactacagctccaagatcgatgagctggacttcctggaacggctgacccgggtgttcgagatcatcaacagctacgagatctacagcaagtttaacaagcccatcctggacatcaacgacatcaagtctctgatcaaggccaacaaggacagcaagggcatcaactccaagaaagagaacttcatcaagatcttcaacaaagaggaaaagaagaacaacctgatcgacttcgtggccagcctgctggccggatcttctgtggaactgaacaagattctgaagaaggacgaggacggccctcagaacagcatcaagattagcttcaccgacgacctgaccgagaagtttctggaactgagaagcgagtaccccgagtacgacgacttcatcagcagcatcgaggacctgtaccggctgtatcaggccctgtacatcaacaaatacgtgcagaacagcctgcctcagaccatggtggaaagattcaacacctacaagaccgacctcaagctgctgaagggctacatccggaagtactacagcaccaaatacgacgaggtgttcaactccatcgagaacaagatgagctaccctcacctcgtgcggcactactgcagcgacatcgacaaaaagaccaaagtgaacatctccaacgataagagcttcagccggatcgagttcatcaattacctgaagaacgagttcagcttcgaccaggacgacgagctgaccctgaaactgaaagagcggatcaactccgacgatttcctgctgacccagagcgacaagagcaacggcaatttcccctaccagctgaattacttcgtgctgaagaagatcatcatcaatcaagagaagttctacagcttcttcgacgagaaggactccaacggctacgtgaacaaggataagatcatctctctgctgaccttcaagatcccctactacatcggccctctgtccaacaactacgacgagagcgacgagaacaaccacgcctggatcatccggaaaaaagagggccacatcagaccctggaacttcgatgagatcgtgaacgtggaagatagcgccaagaaattcatccagcggatgcagaacaagtgcacctacctcatcaacgagtactgcctgcctaaggatagcatcacctttcagaagtacctggtctaccagcagctgaacaccctgtacgtgaacggcaagttctacttcaacagcgacaacaaggatgacctgatcattaacctgtacagcaagaaccggaagatcaccaagaagctgctgcaggactatctcagcaacaagctcaaagagaaggtcgtcatcacctacaaaaacggaaaggacaaggacgtggaacccaacctgcacagcctgagcagcctgttcgatttcatcaaggtgttcggcagctacgaagaggtggacaagaacatcgacctgattgagaacatcatccgggatatcgccatcttcgaggataagtccatcctggcctccagactggaaaacgagtacaagctgaacaaagaccagatccgcatcatcaagagctttaactacaacaagttctcccggctgagcaaaaagctgctggacggcatcaagcccttcgataagaacggggtgctgatcaacaaaaccatcctgaccattctgaaggactacgacggcagcgagaacaaacccgccacactgatggaaatcctgaactccaaggactctgagtacgacttcgacagcgtgatcaagatcgagaactccaaagaagaagagaacgagagcgtcgacagcttcatcgagaatagctacctgccaaagatcagcaagcggcccacaatcctgacctgccggatcattgaagaactggcccacgctctgaaggccaatatcagcgaggacttcgagttctacatcgagtgcgcccggaccaacaagtccgacaagaaggccaccaagacacgctacgagaagctcatggaaaccctgagcaagtccggcctgaagtctcaggtggactccctgatcaacgagctgaagaaatacgagaacgacaagtccaagctgaatgccgagagcctgtacctgtacttcatgcagctgggcaaagacatgtacaccggcgaccagattgacctgaataccatcattgagaattacgacgtggaccacatcatccctcggagcctgattaagaacgacagcctggataacaaggtgctgacagagaaaaaattcaacaacggcaagagcaatatctacccgctgtccaaaatcgacctgtgggagtacaacggcggcagaaagaaggccctcgagttttacaagaagctcaaggacaacaacctcatctccgagcggaagtatatcgccctgaccgccaacaccgatctggacaatgataccctggaaggcttcgccaacaagcagctgtccaccaccaatcagtccgtgatcggcctgaaagaagtgttcgaggactactactccatcaatagcgagaatatcatcctgtccaaggccgagaacgtgtccgacttccggaacaacttcgacctggtcaagagccggacagccaacaacttccatcacgcccaggacgcctacctgaatatctttgtgggcagcgccgtgaacagctggatcaagaatatcttcaagctgtggcggatcgacgagtccaacgagcacaagtacagcgatttcgtgtccttcgtgcgcgagaagcggtacacactgaaccctatcaagatcatggaaaagtacgtgaaggaccagtccgacgagtttaatgagctgaaggacgtgatctacaactacaagttcatcttcaccaagacgcggacctatatcaagaaggacttcttccccaaatccaccgtgtacgccgccaacagctgcgccaacatcaataccaagaacaatctggactgcaagaagtacggcggcttcaaagagtacgccttcggctactacgtgctcatcaagaccaaggataacaaattcattctcgagcccgtgccgtacatctttagcaagaacgccaaccagtacctggacaacctctacaagaagaactacgaaatctacctcgacaacgtcaagatcaacaccaagttccagattgagaagcggcagtttatcatcaccggcaagaccgtgaactcctatctcgtgcggaactctatcgagcggttcttcccctacgatctgatcaaaatcatcaaaaaggtcgacaactttatgaacttcctcaagctcaacaaaatcgccatcaacgtgaagaatcaagagtccatcaacaaggccatcgacgacctcaacaatctgcacaagatcaaagataagaacaacgaactgatctccaaagagaacaagttcggcgagatcgagacactgaccagcaacgagcttatcaacgtgttcgactacctgttcaccctgtatagcaaggatgccttcagctactccttcagcaaggccctgatctatgagcaagaggaactgaaaaacaagtttatgaatctggacatcctgctgaaaacctacaccatcagcgagatgctgaactatctcaagacgaacgagcggaaaaagatcaatctcatcaaactggacaaagaagagaattgcggcaagctcacccagaacaaagtgctgcctctgggcaccaagatcattttcgagagcaacaccggcctgtacaagaaagaaatcatcctcaagggatcc

SEQ ID NO: 2035 - DNA, 4242 bp, Artificial Sequence
  OMNI-250 codon optimized for human cells
ggtaccgccaagtacagaatcggcctggacgtgggcacaaattctatcggctgggccgtgaccgacctgaacaacaagctgatcatgaagaagggcaagaaactgctgggcgtgctgatgttcaaagagagcagcggcggagacaaggaccctaacaagctgcggagaacctaccggtgcagcagacggcggatcagaagaagaaaagagcggctgaactacctgaacgagatcttcgcccctgagatcaacaagatcgaccccaccttcttcgagcggctggacgagtctttcctgaagctggaagatcggaagtacaaggacaagtacaccctgttcatcgacaagaacttcaacgacaagacctacttcaagaagttcaacaccatctaccacctccagaaatacctgatggaatccgagaagaaagaggacatcagactgatctacctggccatccggcacctgatcaagtaccggggcaacttcctgaacagcagcaaccccgacaactacagctccaagatcgatgagctggacttcctggaacggctgacccgggtgttcgagatcatcaacagctacgagatctacagcaagtttaacaagcccatcctggacatcaacgacatcaagtctctgatcaaggccaacaaggacagcaagggcatcaactccaagaaagagaacttcatcaagatcttcaacaaagaggaaaagaagaacaacctgatcgacttcgtggccagcctgctggccggatcttctgtggaactgaacaagattctgaagaaggacgaggacggccctcagaacagcatcaagattagcttcaccgacgacctgaccgagaagtttctggaactgagaagcgagtaccccgagtacgacgacttcatcagcagcatcgaggacctgtaccggctgtatcaggccctgtacatcaacaaatacgtgcagaacagcctgcctcagaccatggtggaaagattcaacacctacaagaccgacctcaagctgctgaagggctacatccggaagtactacagcaccaaatacgacgaggtgttcaactccatcgagaacaagatgagctaccctcacctcgtgcggcactactgcagcgacatcgacaaaaagaccaaagtgaacatctccaacgataagagcttcagccggatcgagttcatcaattacctgaagaacgagttcagcttcgaccaggacgacgagctgaccctgaaactgaaagagcggatcaactccgacgatttcctgctgacccagagcgacaagagcaacggcaatttcccctaccagctgaattacttcgtgctgaagaagatcatcatcaatcaagagaagttctacagcttcttcgacgagaaggactccaacggctacgtgaacaaggataagatcatctctctgctgaccttcaagatcccctactacatcggccctctgtccaacaactacgacgagagcgacgagaacaaccacgcctggatcatccggaaaaaagagggccacatcagaccctggaacttcgatgagatcgtgaacgtggaagatagcgccaagaaattcatccagcggatgcagaacaagtgcacctacctcatcaacgagtactgcctgcctaaggatagcatcacctttcagaagtacctggtctaccagcagctgaacaccctgtacgtgaacggcaagttctacttcaacagcgacaacaaggatgacctgatcattaacctgtacagcaagaaccggaagatcaccaagaagctgctgcaggactatctcagcaacaagctcaaagagaaggtcgtcatcacctacaaaaacggaaaggacaaggacgtggaacccaacctgcacagcctgagcagcctgttcgatttcatcaaggtgttcggcagctacgaagaggtggacaagaacatcgacctgattgagaacatcatccgggatatcgccatcttcgaggataagtccatcctggcctccagactggaaaacgagtacaagctgaacaaagaccagatccgcatcatcaagagctttaactacaacaagttctcccggctgagcaaaaagctgctggacggcatcaagcccttcgataagaacggggtgctgatcaacaaaaccatcctgaccattctgaaggactacgacggcagcgagaacaaacccgccacactgatggaaatcctgaactccaaggactctgagtacgacttcgacagcgtgatcaagatcgagaactccaaagaagaagagaacgagagcgtcgacagcttcatcgagaatagctacctgccaaagatcagcaagcggcccacaatcctgacctgccggatcattgaagaactggcccacgctctgaaggccaatatcagcgaggacttcgagttctacatcgagtgcgcccggaccaacaagtccgacaagaaggccaccaagacacgctacgagaagctcatggaaaccctgagcaagtccggcctgaagtctcaggtggactccctgatcaacgagctgaagaaatacgagaacgacaagtccaagctgaatgccgagagcctgtacctgtacttcatgcagctgggcaaagacatgtacaccggcgaccagattgacctgaataccatcattgagaattacgacgtggaccacatcatccctcggagcctgattaagaacgacagcctggataacaaggtgctgacagagaaaaaattcaacaacggcaagagcaatatctacccgctgtccaaaatcgacctgtgggagtacaacggcggcagaaagaaggccctcgagttttacaagaagctcaaggacaacaacctcatctccgagcggaagtatatcgccctgaccgccaacaccgatctggacaatgataccctggaaggcttcgccaacaagcagctgtccaccaccaatcagtccgtgatcggcctgaaagaagtgttcgaggactactactccatcaatagcgagaatatcatcctgtccaaggccgagaacgtgtccgacttccggaacaacttcgacctggtcaagagccggacagccaacaacttccatcacgcccacgacgcctacctgaatatctttgtgggcagcgccgtgaacagctggatcaagaatatcttcaagctgtggcggatcgacgagtccaacgagcacaagtacagcgatttcgtgtccttcgtgcgcgagaagcggtacacactgaaccctatcaagatcatggaaaagtacgtgaaggaccagtccgacgagtttaatgagctgaaggacgtgatctacaactacaagttcatcttcaccaagacgcggacctatatcaagaaggacttcttccccaaatccaccgtgtacgccgccaacagctgcgccaacatcaataccaagaacaatctggactgcaagaagtacggcggcttcaaagagtacgccttcggctactacgtgctcatcaagaccaaggataacaaattcattctcgagcccgtgccgtacatctttagcaagaacgccaaccagtacctggacaacctctacaagaagaactacgaaatctacctcgacaacgtcaagatcaacaccaagttccagattgagaagcggcagtttatcatcaccggcaagaccgtgaactcctatctcgtgcggaactctatcgagcggttcttcccctacgatctgatcaaaatcatcaaaaaggtcgacaactttatgaacttcctcaagctcaacaaaatcgccatcaacgtgaagaatcaagagtccatcaacaaggccatcgacgacctcaacaatctgcacaagatcaaagataagaacaacgaactgatctccaaagagaacaagttcggcgagatcgagacactgaccagcaacgagcttatcaacgtgttcgactacctgttcaccctgtatagcaaggatgccttcagctactccttcagcaaggccctgatctatgagcaagaggaactgaaaaacaagtttatgaatctggacatcctgctgaaaacctacaccatcagcgagatgctgaactatctcaagacgaacgagcggaaaaagatcaatctcatcaaactggacaaagaagagaattgcggcaagctcacccagaacaaagtgctgcctctgggcaccaagatcattttcgagagcaacaccggcctgtacaaaaaagagatcatcctgaagggatcc

SEQ ID NO: 2036 - DNA, 3003 bp, Artificial Sequence
  OMNI-266 codon optimized for human cells
ggtaccaagcggagagtgttcggcttcgatctgggaatcgcctctatcggctgggccgtcgtggaatttgacaacgagtactacgacatggaaaccggcgagatcctggccgacaaagtgaatggatctggcgagatcgcccagggcacaatcgttggctgtggcgtcagaacctttcctgtggccgagaatcctaaggatggcagctctctggccgctgccagaagagagaaaagactggccagacgggcctgcagacggaaagccagaagaaaaaaaggcctgcagggcctgtttgccgccaaaggacttgctgaaagccctgccgccttcaccgacgagatctgtatgagacagatcggcggcgacgtgtggaacctgagagtgaaggctctgcaagagaagctgagcaaagaggaactggcccgggttctgtaccacctggccaatcacagaggcttcaagagcgtgcggaaggcccaagaggaaaacgacaaggatagcggcaaggtgctgagcgccatcagagccaatatggccctgaaagaggacggcaagtctctggcccagatcatcgtggaaaaagccggcgagacaggcaagaagcggaacttcagcaaggtggtcaaagtgaacaagaaaggcgaggacgtgaaagaggccgactaccggaatagcatccccagatctgagattgaggccgagctggccatgatcttcaccaagcagaaagagtatggcatcttcacccaggacctgtacgacgacttcgtgaagatcgccttccggcagaggggcatcaagtctgtgggcgacatggtcggaaactgcaccttcgagaaggacgagaagcggagccctaaagaagcccctaccgccgagtttttcgtggcctggtccaagatcaacaacctggccgtgtacgagggcgacaagaagagggaactgacccctgaggaacggcagaccctgttcgatgtgctgaaagtgaccaaggacatcaagtacaagaccatccggtctaaggtgttcaagggcaaagacatccagttcacctgtctgaactacagccctaagcagaagaagaacaaaaacggcgagctggtcaccatcgatcccgaggatgtgctgttctacaacatgaagggctggcacaagctgcagagcatcttcaaggccgagtacagcgacatcttcaacgacatcaagaaactggacaaggccgtgaccatcattgccaccgagaaagaggatgtcaagatccaagagaaactgcaagagctgggctacagccaagagaagatcgacaagtttctgaccctgagcttcgataagttcatcaacctgagcctgaaggccctgtacaagatcaatccctacctggaaaagggcgagaagtacgacaaggcctgtgccaacgccggctacgacttcaaagagatcaccgacaagctggtcaacgagaagggactgctgctggccgtgatcgacaaagaaaaactgaccaaggtgcccgtggtcaaccggacaatcgcccagttcagaaagctgtacaacgccatggtccgacagtatggcgcccctgaccagatcaatatcgaaaccggcagggacctgaagaagtccgccgaggaacggaagaagatccagaagctgcaagaagaaaaccgggacaagaaccagagcatcaaaaaacagctgctggaatggggcgtgaaggacaacggcaccaacatcaccaagctgcggctgtacaatgagcagcagggcaagagcatctacagcggcaatgagatcaagatcgagcagctctttgacgacggctacgtggaaatcgaccacatcctgccttacagcagaagctggaacaacagccagagcaacaaagtgctggtgctggcccgcgagaatcaagagaagggcaatcagacccctttcgagtacatcggcaagagcgacgccaagtccaaagagtggaccgacttcaccagctacgtgacaagcttcgccagcatcgagaagcacaagaaagaaaagctgctgctcgagacattcaacgagagagagcaagagttccgggacagaaacgccaacgacaacagctatatcgccctgtacgtgaagagatacctggaagatggcatcgacttcggcaagtccctgcacaccgagattaagaacaaggtgcaagtgcggagcggcaacgtgaccgcttttctgagaaggcagtggggcctcgagaaagacagaaccgagagcgataagcaccacgctcaggatgccatcgtgatcgcttgtgctgctcaaggcatggtgcaggccctgagcaagattagcagaaaagaaggcgtggtccacaccgacgccgtgcaccggaaatatgccattgccaagccttgggacaacttccggaatgacgtgctgacagccctcgagaaggtgttcgtgtctcggtcccctagaaagaaggccagcggagagatccacagcgagacaatctacaccctgaacgagaaaaagaagcagttcgaggccaagaacgccaagagcggcttttacgttagaggcggaatcgccggcaacggcgacatgctgagaaccgacgtgttctgcaaaaaaaacaaaaaggggaaagtgcagttctacctggtgccgatctacaagtccaacctgggcaaagaactgcccaacaaggccatcgtggccaacaagaacgaggacgagtggacagtgatcgacgagagcttcagcttcatgttcagcctgtttctggacgacctgatcaaggcccagaaagacgagacagtgaccttcggctactacaaaggcgtggacagagccaacgctgccatcacaatcgaggtgcacgacagaagccaggacaacgccagaatcggcacaaagaccctggactccatcaagaagtaccaagtcaacctgctgggcgagtatttcgaagtcggcggagaaaagaggcagctgctgacccacgaagagggatcc

SEQ ID NO: 2037 - DNA, 3057 bp, Artificial Sequence
  OMNI-269 codon optimized for human cells
ggtaccaagaagatcctgagcctggacatcggcatcagcagcatcggaaatgccgtggtggaactggacgacgagaacttctacggcaagatcctggatgccggcgtgcggattttttctgccgctgaacagcctagcggcgattctctggctgcccctagaagagaagctagaggcgccagaagaagaatcagcaggcggagcagcagactgtacaacatcaagaagtacctgatcctgaacaacttcatcacccaagagcagatcgagaacctgtactgcagcaacaagcagatcaaggacgtgtggaccctgcggaaagaggccctgtaccggaagctgaacaacgaagagttctaccgcatcctgatgcacattgccaagcggagaggcttcaagagcatcagaaagagcgaggaagccaagaaagagggcgacctgctgaaggccatcaagcagaactaccaagagttcgagaacggccagtacaagaccatcggcgagatgttcgccgagaaggacatcaagaggaacaagcgcgagaagtacaacaacagcatccccagggacctgctgcagaaagagatcgagatcatcttcgagacacagcggaagctgggcagccctctggccaaagaggaaaccgagaatttctacctgcaaaccgccttctaccagcggccactgcagagcatggaagataagatcggctactgcagcttcgagcccgatgagaagagggcccctaagtgtgcctacaccagcgagatctttaccgccgccaccaagctggtcaacctgagcattacagatgagctgggcgagtgcagagtgctgtgtggcgacgagatcaaacagatcatcgagctggcccacaagaacaccaaagtgacctacaagcagctgaagaaagagctgtgcctcgaggacaacatcctgttcaacggcctgaactacaacaagaaggacaagaaccccgaggacagcaccctgatcgagctgaaaaactaccacctgatcaagaaatccatcgtgaacgacaagaatctcggcaaggtgtacttcgaggccattaagtacgacaaggacctcttcaacaatatcgccaccgtgctgacctgcgagaagtccgatgagagcgtgatcgcccggatgaaggaatacttcatcgacgacaagatcattgcctgcgtgaaggacctgtccatgagcaagaccatgcacctgtctctgaaagccatggaaaagatcctgccttacatgctcgagggctacaagtacaacgaggcctgtgaactggccggctacaaccaccacagcatcagcaagaacaagaccaagcagaatttcctgcctgtgctgcctcaagaagaactgaccaccaatcctgtggtcaaccgggccatcagccagaccagaaaggtggtcaactctctgatcaagcggcacggcaccttcgactacatcatcatcgaaatggcccgggacctgagcaagagcttcgacgagcggagaaagatcaagaaggcccaagaggactttcagaaccagaaagaactggcccggaagcggtgcatcgagaatggactgaaccctgactaccccaagtccaatctgctgaagttccggctgtgggaagaacaaggcggctactgtatctacagcggcaagtacatcgaccccagaaagctgagcgaccaggactacacagacgtggaccacatcatcccttacagcaagtccttcgacgacagcctcaacaacaaggtgctgtgcctgtccgacgagaatcggcagaagggcaacaagatcccctacgagtacatcggggagagcaagtggtacgacttcgtgcagcggatcaagacctacaacctgaagtccgccaagtataaccggctgatccggaagtcttacgagagcgagggctttaagagccggaacctgaacgacacccggtacatcaccaagttcatcaaggattacatcaaagagaacctggacttcgggaacaacctcaaggtggaaaccagaaacggcagcctgaccgccttcctgagaacacagtggggcctgattaagaaccgggaagagaacgacagacatcacgccctggatgctatcgtgctggcctgttctacacaaggcatggtgcagtacctgagcaccgtgtccgccaaaatcgagaactacaattacaccaaggataagaagccccggttcaagcggccctgggccaccttcaaagaggatgttgagctggccatctccaagatcttcgtgtctagagccctgagagcctccgtgtctggacagctgcacgatgccacaatcagaagccccaaacatctgcaggacggcttcacagtgctgaaaacccctctggaaaaaatcaacctgcagaccctcgagaagatgtacgacaaagagcggaacattaagatctacaatctgctcaaagagcgcctgacgaagttcaacaacgaccccaaaaaggccttcgaggaacccgtgtacatgcccatgtccgaggaaaagctgaagcagggccagaagcctcatctgatcaaaaccatcaagattaaggacaactccatcagcggcatcaaggtgcacaacggcttcgcccagaacaccagcatgcccagagtggacgtgttcaccaagaaaaacaagaaagggaagaacgagtacttcctggtgcctatctatatcgccgacttcggcggcgagctgcccaacaaagccatcagcaccggcaagaaccggtggatcgagattaccgacgactacaccttctgcttttctctgtaccccaacacgctgatcgccatcaatcctaccggcaagcccgaggatgagttcctgggctactacaagggctgcgatatcaccaccggcaccatcaagctggacagccacgatcggacaatcaaggacaagcggatcagcaccaagaccgccgcctacatcaaaaagtatcaagtgggcgtgctgggcgactaccacgaagtgaagcacgagaagagactgaagctgaagggccccaagggatcc

SEQ ID NO: 2038 - DNA, 3102 bp, Artificial Sequence
  OMNI-274 codon optimized for human cells
ggtaccgtgaagatcctgggcctcgatatcggcatcagcagcgtgggctatagcgtgatcgagctggacgagaacaagttcaacggcaagtttctggccctgggcgccagaatttttacagccgccgaacagcctaagaccggcgcttctcttgccgctcctagaagagaagccagaagcgccagaaggcggctgagcagaagaagctgccggctgtacaacatcagacggctgctgctggaaaagcagttcatcacccagaccgagatcgccgagatctacgatacccacgagcagctgaccgacgtgtgggatctgagaaaagaggccctgaaccggaagctggacaacaaagagctgtaccgcatcctgatgcacattgccaagcggagaggcttcaagagcgtgcggaagtccgaggaagccaagagagaaggcgagctgctgaagtctatcgccgaaaccaccgaagagttcaagcagggcaagtaccggaccatcggcgagatgtttgccctgaagtacaccaacggcgaggccaagagaaacaagagcggcaactacaacaagagcattgcccgggacctgctgagacaagagatcgagatcatcttcgagatgcagagaaagctgggcagcacaatcgccaacaacgagattgagaagggctacaaagagatcgccttctaccagcggcctctgaaaaccatcgagattaagaccccttgtcctttcgagcccgaagagaagagggcccctaagtgtgcctacaccagcgagaagttcagcgccctgaacaagctggtcaacctgcggctgatcaacgacctgggcgataccagatttctggcctctgccgagatcaaggatgccgtgcgactggccaacaagctgagcaaagtgacctacaagcagctgcggaaagaactgtacctggacgacgagatccggttcctgaacctgaactacacaaagaccgacagcaagggccagcaggtcgaccctgaaacagccgtgctgatcgagttcaagaactaccacagcatccggaaggccctggaatgcaacggcaacctgggcaagatctacttcgacagcatcaaggacgatgaggacttcttcgacaatatcgcctacgtgctgacctgcgagaaaaccgacgagagcatcgaggaaaagctgaaagagtacggctactctgccggcgtcatcgactccatcaaagaactgagcatgagcaagaccagccacctgagcctgaaggccatgaagaaactgatcccttacatgctggacggcaagaagtacacagaggcctgcgaactggccggctacaagaccgaaaaccagaacaccgccaagcagagcctgctgcctgagctgtctcaagaggaactgaccgtgaatcccgtggtcaacagagccatcagccagaccagaaaggtggtcaacgccctgatcaagaagtatggcatcctggatagcatcatcattgagatgagcagggacctgtctaagaccgccaccgagagaagaaacatccagaagctgcaagaagagtttaagagcgagaaagagaaggcccggcagcggtgcctggaaaacggcctgaatcctgacttccccaagagcaacctgctgaaattccggctgtgggaagaacaaggcggcttctgtgtgtacagcggcaagcacatcgaccccaagagactgagcgagcaggactacgtggacatcgaccacatcatcccatacagcagaagcttcgacgacagcctgaacaacaaggtgctgtgcctgaccgatgagaaccggcagaagtccaacaagatcccctacgagtatatcggcgaggacaagtggtacgacttcgtgcagagagtgaagtcctaccacctgaagcagcccaaagtgaacagactgaccaagaagaagtacgagcaagagggcttcaagtcccggaacctgaatgacacccggtatatcgccaagttcgtgaaggattacatcaaagagaacctggacttcggcaacaacctgaaggtggaaaccagaaacggcagcctgaccgccttcctgagaaatcagtggggcctgattaagaaccgggacgagagcgataagcaccacgctcaggatgccgccgtgatcgcttgtagcacccaaggcatggttaagtttctgagcaccgtgtccgccaagctggaaaactacgactacagcaaggacaagaagccccggttcaagcggccctgggagacattcaaccaggacctggaatacgagctgagccgggtgttcgtgtccagagccgccaagaagtctttcagaggggaactgcacgacgccaccatcagaagcgtgaagcacctggataagggcttcaccacagtgaagaagcccatcgagcagattgacctgaaaaccctggaacagatgttcgacaaagagaggaactacaagatctataacctgctcaaagagcgcctcgagcagaacaacaacaaccctcagaaggcctttcaagagcccgtgtacatgcccctgtccaaagagaaagaggccaaggggcagaagccccaccggatcaagagcatcaagattaaggataccggcaccagcggcgtgctcgttagaggcggactggctaagaatgccagcatgcccagagtggacgtgttcaccaaaaagaacaagaagggcaagaacgagtacttcctggtgcctatctacgtgtccgacttcggaaaagagctgcccaacaaggccatcaccagcaagaaggattgctggctggaaatcaacgacgagtacaccttctgcttctcactgttccccgacacactgatcgccatcaatcctaccggcaagcccgaggatgagttcctgggctactacaagaagtgcaacatcagcaacggcgccatcatcctggacagccacgaccggtctatcaaagaaaaaggcttcggctccaagaagctggtctacatcaagaaataccaggtggacatcctcggcgactaccacgaagtgaagcaagaaaagcggctgggcatcaagcccaagcagaaaggccagcagaaagacggcgttggatcc

SEQ ID NO: 2039 - DNA, 3171 bp, Artificial Sequence
  OMNI-281 codon optimized for human cells
ggtaccaccaattacaccctgggcctcgacatcggcatcacatctgttggctacggcctgatcgacaccgacaccaagtctgtgatcgatgccggcgtgcggctgtttcctgaggccaacgtggaaaacaacgagggcagaagaagccagagaggcgccagacggctgaagcggagaagaatccaccggctggaaagagtgaagcggctgctgagcaactaccacctgatggaagagagcaaccctcctcacagcacaaacccctaccagatcagagtgaagggcctgagagaggaactgagcaaggctgaactggccgtggctctgctgcacattgccaagagaagaggcatcgacaacatgagcgtggacgccgaggatgatgccccttctgatggcgtgtccacaaaggacgtgctggccaagaatgccaacgagctgagccacaaatacgtgtgcgaactgcagctggacagactgctggctgagggaaaagtgcggggcgagcagaacagattccagaccaaggacctgatcgaggaagtgaaacagctgctgaccacacagaagaactaccacaccttcgacgacgagttcatcaaccactacatcaagctggtgcagcagcggagagcctactatgaaggacctggcgagccttctccttacggctggggcggaaacctgaaagaatggtacgagatgctgatgggccactgcacctactttcccgatgagctgagaagcgtgaagtacgcctacagcgccgacctgttcaacgccctgaacgacctgaacaacctcgtgatccagcgcgacggcgtgccctacctggaatacttcgagaagttccacatcatcgagaacgtgttcaagcagaaaaagacgcccacactgaagcagatcgccaaagaaatcgacgtgacccctgaggacatcaagggctacagagtgaccaagagcggcaagagcgagttcaccaagttcaagatctaccacgacctcaaggacatcctgacgcacaaagagtacctggaagataacgatctgatggacgaaatcgccaagatcctgaccatctaccaggacagcgagagcatcaaagaggaactcgagaaactgaccgagctgttcaccgaggaagagaaagaggccatcagccagctgagcagctacaccggaacacacagactgagcctgaagtgcatcaactacgtgctgcccgacctgtggaaaaccccttacaaccagatggaactgttcacccagctgaacctgaagcctaagaaggtggaactgaagaaccagaatcacatccccaccgagatcgtggatgagttcattctgagccccgtcgtgcggagaagcttcatccagtctatcaaggtggtggacgctgtgatccagaagtacggccagcctaccgacatcatcattgagctggccagagagaacaacagcaaagagcagcggcagtttatcaacaagctgcagaagcagcacgaccagaccagacaccggatcgaagagatcatgaagcagtacaacaacgagaacgccaagtacctgttcgagaagatcaagctgcacgacatgcaagagggcaagtgcctgtacagcctgaaggatatccctctggaagatctgctgcggaacccttaccactacgaggtggaccacatcattcccagaagcgtggccttcgacaactctctgaacaacaaggtgctcgtgcggcaagaagagaacagcaagaagggcgccagaacaccctaccagtacctgaatagcagcgacgccgtgatcagctacaaccagtttaagcagcatgtgctgaacctcagcaagagcaaggaccggatgagcaagaagaagcgggactacctgctggaagaacgggacatcaacaagttcgaggtgcagaaagagttcattaaccggaacctggtggacacccggtacaccaccagagaactggccaacttcctgaaaacctacttcaagatcaacaacatcgacaccaaagtcaagaccatcaacggcggcttcaccaactacctgagaaaagtgtggcggttctccaaagagcggaaccacggatacaagcaccacgccgaagatgccctggttatcgccaacgccaactttctgttcaaacagcacaaggccctgaaagaggctgagaaggtcctgaacaatcccgccagcaaggacgagagcgccatcgatgtgttcaacgacaaccagtacaaagaactgatggccaaaaacagcgtggtcgacgagatcaaggactttaaggacttcaagttcagccaccgcgtggacaagaagcccaacagacagctgctcaacgacacactgtacagcacccggaacatcgataaccacgactacatcgtgcagaagctgaccaacatctacgacaaggacaacaaagaagtgaagaagatcgtcagcgagaagcccgagaagctgctgatgtaccagcacgatcccaagaccttcaagaaactgcagaccgtgatggaccagtatgccgaggaaaagaaccctctggccaagtactacgaggaacacggcgagtatctgaagaagtatgccaagaaaggcaacggccctgccatcaagtccctgaagtacatcggcaagaaagtgaacgcccacttcgatgtgaccgacaagtaccccaatcctaagaacaagctggtcaagctgagcctcaagagcttccgcttcgacatctacaagggcgagtccggctataagatgctgggcctgagctacctggatgtggaaaagaaggacgcctactacagaatccccagcgagtattacgaagaactgaaaaagaagaaaaagattaacgagggcgacgagtttatcggcagcttctacaccaacgacctcatcaaagtgaatggcgagaagtaccgcgtgatcggcgtgaacaactccgaccggaatatcattgaggtggacatgcccgacatccggtacagagagtacctcgagcttaacaacaaaaagggcacccctcggatcttcatcaccatcgggaagaagattaacaccatcgagaagtatagcaccgacatcctgggcaacctgtacaagaacgagcggcccaagaagcctcagctgatctttaagaaaggcgtcgagggatcc

SEQ ID NO: 2040 - DNA, 3249 bp, Artificial Sequence
  OMNI-293 codon optimized for human cells
ggtaccaaatacggcgtcggcctggattgtggaatcgcctctgtgggctactgcgtgaccgagctggacttcaacgacgagcccagaagaatcatccggctgggcagcagaatcttcgacaaggccgagaatcccaaggacggcagttctctggcccagcctagaagagagaagcggggcctgagaagaaggatcagaaggcaccagcaccggctggaaagaatccggtacatgctggtgcaagagaacatcgtgtcccaggccgaactggacaccatgttcaagggcaagctgagcaacatctacgagatccggacaagagccctggacgagcccgtgtccaatatcgagtttgcccgggtgctgatcaacctggctcagagaagaggcttcaagagcaaccggaaggtggacgaggaaaccagcgacaaagagacaggcaagctgctgggcgccatcgagaacaacaaagagaatatcatccagaacggctaccggaccgtgggcgagatgctgttcaaggacgagcggtacagcaagtacaagcggaacaaaggcgaggactacctgaacaccgtgtccagagacatgatcgccgacgagatcaaggccatcttcgccagccagagaagcttcggcatgcccttcgccaacgagaataccgagcacgagtacaccgacatcgtgatgagccagcggccttttgatcttggccctggcgagggcaatgagaagtctccttctccttacgccggcaaccagatcgagaagatggtcggacggtgcacattcttcccaaaagagaagagagccgccaaggccacctacagcttccagctgtttagcctgctgcagggcatcaacaacatcaccctggtggacggcaacagcaacaagtaccctctgtctgcccaagagcggagaatcctgaaagagtactgcttcaacaccgccaacgtgacctacgccagcatcagaaagaagctgggcatcagcaccgactaccggttcaacaatatcagctacggcgagaacggcatcgaggaaagcgagaaaaagaccaagttccagcacctgaagaactaccaccagatgaagaagatcctgggcgacagcatcaacgccttcagccacgatgagctggacgagatcggccggatcttcacctactacaagaacgacagcaagatcatcgagaatctcaaagaggccggcatcgacgagagcatgtatcccagtctgctgaagctgcctagcttctccaagatgggccacatcagcgtgaaggcctgcaagatgctgatcccattcctggatgagggcaagacctacaacgaggcctgtgaaagcgccggaatcgacttcaaagcccacagcatggccaccaagcagatgtacctgcctcctaagagcgacgagctggaagatatcgtgaaccccgtggtcaagagggccgtgtctcagaccatcaaagtgatcaacagcatcatccgcgagatgggcaacagccccacctacatcaatatcgaactggcccgggacctgagcaagagcaagaaagagcgggatctgatcgacaagaagtaccagaccaacagggccgccaatgagcagattaagaaagagatcgccgataacttcggcttcgaggccaaaggccaggacatcatcaagctgaaactgtggcacgagcaggacggcatctgcccctatacactgaagcccatcgagtacggcaagctgttcaacgacaagggctacgtggacatcgaccacatcgtgccttacagcgcctgcttcgacgacagctacaacaacaagatcctgaccttctccagagagaaccggcagaagtccaacagactgcccctggaatacctggacgaaagccagaaatccaagtaccgcgtgtgggtcaacaacaacattaagaattaccggaagaagcagaacctgctcaaagagtgcctgaccgagaacgacaaaaaagagttcaagagccggaacctgaacgacaccagatacctgtccaaggtgctgtacaactacatcaacgataacctgctgttcgacgagttctacgacgaccggaagagacacgtggtgtctgtgaatggcgccgtgaccgcctacatgaggaagagatggggcatcgacaaagtccgcgagaatggcgatctgcaccatgccgtggatgccgccgtgatctcttgtgtgacccagggcatgatcaatcagatctccaagtacagcttcgacaaagaaaccgagttcgacgtggacaccagaaccggcgaggtcctggaacagttcccatttccatacagagagttccggaaagaactggaagccagaagcgagatcgaggacgagaagcggctgaagaacgtgctgctgagcctgcctaactacagctacgacgatgtggaagtggccaagcctgccttcgtgtccaggatgcctagacacaaagtgaccggcgaagcccacgaggccacaatcagaagcggcaaggtcgagggctataccatctctaagatccctctgaccaagctgaagctcaagaacggcggaatcgataagtactacaagcccgagagcgacaccctgctgtataacgctctgctgcagcggctggaagagtttaacggaaacgccgagaaggcctttgccgaagagttccacaagcctaagtccgacggcacacctggacctgtcgtgaagaaagtgaagatcattgaaaagtccagcagcaacgtgaaggctcggaacgagaacaagctgggcgttgccgataatggcagcatggtccgaatcgacgtgttctatgtggacggcgagggctactacttcgtgcccatctacgtgtccgacaccgtgaagcccacactgcctaacagagcctgtagcagaggcaagtccggatggaaagagatggacgacaaggacttcgtgttcagcctgtacagcaacgacctgatcagaatcaccgccaagaaagacatgaagttcagcctcgtgaacaaggacagcaccctgccttccaacaagttctccaacggcgagctggtgtactacatcaccgccgatatctccaccgcctccatcaccgtggaaacccatgatggcgcctacgccttcaaaggctgtggcatcaagaccctgaccaacatcgagaagtacacagtggaccctctgggcaacgcctccaaagtgaaaaaagaaaagcggatgtacttcaagggatcc

SEQ ID NO: 2041 - DNA, 3252 bp, Artificial Sequence
  OMNI-295 codon optimized for human cells
ggtaccaagatcatcggcctggacatcggcatcagatctatcggatgggccctgcaagaggacggcgagatcattgccaagggcatcagaatccccagatccgtggaagatgcccagaccaaagaaagcctggccgctcatagaggcgccgctagaagaatcagacggaccctgtacagacggaaggccagactgtctctgctgaagcggctgatctgcaacgagttcggcctgaacctggccgactatcacgccaaagatggcgacctgcctaaggccttcgtggccgatgagaacacaaagagcccctacgagctgagagtgaaggccctggaacacaagctgaacgccgatgagttcgccagagtgatcctgcatatcgccaagcacagaggctacggcaacaagcacgcccggaaagagagcgataaggataagggcgctgtgctgagcgccctgaagaacaatgagaaagccctgaccgcctacaagagcgtgggcgagtacctgtacaaagagttctaccagaagggccgcttcatcaccaccaaggacgagaacggcaaagaggtgctggaacgcgacgaggcccatttcggaaaagtgcggaacaccaccgacgtgtacgagcagtgcatgagacaagagtggctgcaggccgagctggaactgatcttcgagaagcagagagagctgggcttcaagttcagcgacgagttcaagaacaaagtgctcgagatcgccttcttccagcggcctctgaaggacaccgatgacaaagtgggcttctgcacattcttcccagacgagaagagggcccctaaggatagcctgagcgccattgaatatgtggccctgggaaagatcatcaacgagctgaagtacatcgagaagaagtggaagaaagaaaccggcgaggaactgaagggcaagatctgcgcccctcagaacatcaacgacatcctgaagatcgtgatcgagaagggcgagattagctacaaagaatttcggagcatcctcaagctggacgagcgcgtgaagatctttagcaagaacgtgaagctggactacacccagaaaaccatcgatgaggccgagaaggccaagttcctggaactcaaggccacaaaggacaacctgaacatccccaacctgaagggcttccagaacgccctgaaaggcagctttgagaagttcgacagaaagaccctggacgatatcgccttcgacctggccaccatcaatgacaaagagaagctgttcaaagagctggataagtacgacctgtccgccgagcagaaagaggccctgagcaatctgagcttcagcaagtttctgaacctgagctacaaggccctgaacgagatcatccctctgatgaaggacggcctgagatatgacgaggccgtggaaaagctggggtttaagccctccgacgagtacgactacgacaaggtgcagaaagaactgcacaaccccgtggtgtctcacatcctggccgaggttgtgaaggtgctgaaggccatcctgaaaaagcacggccaggtgcacaagatcaacatcgagtttaccagagaggccggcatcagcaaagagaaacggaacaagctcgagaacaagcagaagtccaatttccaggccaacgagaaagccaaagagatgtgcaacaccctgggcatcgtggccagccacaagaacattctgaagattaagctgtggaaagagcaaggcggagcctgcgtgtacagctgcaacaatggcaagggcaaaaccatcaccgagaaggacctgcaggacgagacaaccctgcagatcgaccacatctacccctacagcagaagcttcgacgacagctactccaacaaggtgctggtgttcacagagcagaaccagatcaagagagagcggacccctttcgaggccttcggcagcaataccaacaagtggaacaatatcgtgtccttcgtgaacggctgcaagaccatgagcgagtccaagaagaagagaatcctgaacaccgagtttaaagagcgcgagcagggcttcatccagcggaatctggtggacaccagctacattgccaacgtcgtgcgggactacatcgacaaaaacgtgaagttcctgcctctggacgaaaaagaactggcccagagcaccatgttcttcgagctggacagctacaacgagaaggatgacagcaagaaggcctacaagcgcaagcacatcgagattatcagcggcaacctgaccagcatgatgaagcactactggggcctgcacttcctggacaagaagaatgagttcggcgagtacgagaaagaccggaaccaccatctgcatcacgccctggatgccatcatcatcagctacatgaacgccagccgcgtgaaggcctttgccgacttcaagaaaaacctggaaaccatgaaggccagcgagtacgccgagaagctgagcgagattgagaaagagcagaagcggaccaagcggaagaaaagcaccttcgaggtgcccagcaactacgccaatcgggacgagttcgagcggaagatcaaagaacagatcttcggcatcttcgtgtcccagcctccaaacaagaaagccagaggcgccctgcacctggatagcttctacagccagagcgacaccagcgtgatcagcagcaaggacaccatggaaaacgccctcgaactgggcaaagtccggaagatcggcaccaagatcgtgtccaatgccagcatggtccgactggacatcttcaagagaaagaaggacgacaagttcttcggcgtgcccatctacacaatggacttcgccaaaggcgtgctgcctaacaaggccgtgggcagcaaagaatggatcgagatggactccaactacgagttcctgttcagcatcttctccaacgacctgctgtacgtgaagaaaaaaggcatggaaaaagccgagctgtgctactacgtgaaattcgacatcggcggaggccagatcagcttcaagagccacgacaacagactgaagtccctgaccgagaatcagatcaaactgtacggcactaaggaccccaccgaggaaagagtgcggggcagagttggaatccagaatctggaaattttcgagaagtggcaggtttccccactgggcgaagtgaaaaaggccgagttcaaagaaagggaaccgatcgctctgaagtccacacctaagaactctaagctggacaaactgaactccaagaccgagaggaagggatcc

SEQ ID NO: 2042 - DNA, 3300 bp, Artificial Sequence
  OMNI-308 codon optimized for human cells
ggtaccgcctatgccatcggcctggatatcggaatcgcctctgtgggatatgccgtggtggccctggactacgaggaaaacccttggggcatcatcaacatgggcagcagaatcttcgacgccgccgagaatcctaaggatggcgcttctctggccgctcctagaagagaagctagaaccggcagacggcggctgcggagaagaaagcacagaatcgagcggatcaagaacctgttcctgaacacccagctgctgaccaaagagcagctggaaaagctgtacgagggcgtgctgtccgacgtgtacgagctgagagtgaaaggcctggatgagaagctgacagccgaagaggtggccagagttctgctgcatctggcccacagaagaggcttcaagagcaaccggaaggccgagaaaaccgacaaagagaatggcgccctgctgaccgccgtgtccgagaaccagaaacggatgaaggacaagcagtaccggaccatcggcgagatgttccacaaggatgagctgttcgccgagtacaagcggaacaaaggcggcacctatctgaccaccgtggccagggaaatgatcgccgacgaggccaagtacatcattgccacacagcggagcttcggcaacaagaccctgaccatcgagttcgaggaaagctacctggacatcctgctgagccagcggaactttgatgaaggccctggcggcaatagcccttacggcggagatcagatcgagagaatgatcggcaactgcaccttcgagaagtccgagaagagatgcgccaagagctgctacagcttcgagtacttcaacctgctgcagaagatcaaccacctgagactgctggtggacggcgtgaaggtggaactggatggcagccagaaaagcaaagtgatcaacctggccaagaccaaggccgacctgaagtacagccagatccggaaagaactcggcctgggcagccaggtgctgttcaatgccctggtgtacaacagcgacgtggaagaagtggaaaagaagtccaagttcaacttcatgcccgcctaccaccagattagaaaagaactggacaccgtggtcaaaggccggatcgaggccatcgacatcgatacactggacgagatcggcagaatcctgagcacctacaagagcgacgccaagagaatcgaggccttcagcaacctgaacatcaccagcaaggacatggaagccctgctcaacatcaacggcctgagaaagtttggccacctgagcctgaaagccctgaagaagatcaccccatttctggaacagggcatgatctacaacgaggcctgtacagccgccggatacgagtttagaggccacagcggctacgaaaagaccttcctgctgcctagccagaccgaagagatggaaaacgtgacatctcctgtggccaggcggagcatcagccagagcatcaaagtgattaacgccatcatcagagagcagggcgagagccctctgtacatcaatgtcgaactggcccgcgagatggccaaggacttcgacgagcggaagaagattaagaaagagacagacgagaatcaggcccggaacgagcggctgatcgagaagatcagaaacgagtttcacaagcagaaccccaccggcctggacctggttaagctgaagctgtgggaagaacaggatggcgtgtccccttactctcagaaacagatcgtgatcgagaggctgttcgagcccggctatgtggacgtggaccacatcgtgccttacagcatcagcttcgacgacaccatgaagaacaaggtgctggtgttcgccagcgagaaccgcgagaagggcaagaatctgcccgtggaatacctggccagaaaaaagggccagaaagccgtggacgacttcaaagtgtgggtcacctccaacgtgcggaactacaagaagcggctgaacctgctgaagtccgaagtgaccgaggaagatctgaacaagttcaaagagcggaacctgcaggacaccaagaccatcagccggttcatgtacaactacatcagcgaccacctgatcttcgcccctagcgagacaggcaagaagaaaagggtcaccgccgtgaacggcgccatcacctcctatctgagaaagcgctggggaatcaacaaagtccgcgccgatggcgataagcaccatgccgtggatgccctcgtgatcgcctgtaccaccgacaagctgatcaaggacctgagctaccacagccggtatctggaaatggaatacgaggccggcgagaaagaaagcctgtgggtcaacagaaacaccggcgagatcgtgaagcggttcccctatccttgggaagatttcagagccgagctgatggccagactgtctgatgcacctgaagtggccctgcggaaactgcagctgctgtactaccaggacaaggacctcagcaagatcaagcccatcttcgtgtccagaatgcctcggagaaagatcaccggcgctgcccacaaagctacagtgcggggagccagatatgtggacaagggcatcgtgatcagcaagaagtccctgagcgagctgaagctcaacaaaggtggcgagatcgagaactacttcgcccctgagagcgacagactgctgtatgaggccctgaaagaacagctgaagaagtttaacggcaacgccaagaaggctttcgagcagggattctacaagcctaaggccgacggcacccctggacctaaagtgaacaaagtgaaggtgtacgacaagagcaccctgaacgtggccgttcaacaaggcacaggcgccgctgacaacgattctatggttcgagtggacgtgtacaaggtggaaggcgacggctactacctggtgcctatctatgtggccgacacactgaagaaagagctgcccaacaaggccattgtgcagggcaagacctacgagcagtggaaagagatgagccccgaggacttcgtgttctctctgtaccccaacgacctgatcaagatcacgcacaagaaagaaatcaacttcagccgggtgtccgaggacagcacactggccgatagctacaagaccaaagaagagttcgtctactacaaaaagaccagcatctccaccgcctccatcagcatcattaacaacgacaacacctacacaatccccagcctgggcgtgaaaacactggccagcctggaaaagtaccaggtggacattctgggcaactacaccaaagtgggcaaagaaaagctgcagaccttcgccgcctatcagcaggccaagaaaaagcccggatcc

SEQ ID NO: 2043 - DNA, 3303 bp, Artificial Sequence
  OMNI-309 codon optimized for human cells
ggtaccaagcacatcagatacaccctgggcatcgacatcggaatcgcctctgttggatgggccgtgctgcagaatgatgtgtacggcgagcccgtgaagatcgacagactgggcgtcagaatcttcgagcgggccgagaatcctaaggatggcagttctctggccgctcctagaaggcaggccagaggctctagaagagtgatccggcggagaaagcaccggaaggaccggatcaagaagctgatcgccagcagcggcatgatggaacaagagcagatcgacaccctgttcaccgccggcagattcgagaagtccgtgtacgaactgagagtggacgccctggaacggaagctgagcgtggaagagacaatccggctgctgatccacttcgcccagagaagaggctaccagagcaacagcaagagcgaggaagccaaggacgccaaagaaaacggcaaagtgaagcaggccatcagcgacaaccggcagagaatgctggaacacggctacagaaccgtgggcgagatgttctggaaggacgacctgttcaagcggacaaaccctgatggctctgtggtgctggtggtgcacaatcagcccgacgactacaaagtgaccgtggaacggcagatgctgcgcgaggaactgcagctgatgtttgcccagcagcgcgcctttggaaatgagtgggcctctgaggcctttgagagcgcctatctggaaatctggggcagccagagaagcttcgatgaaggccctggcggcaattctccttatggcggaggacagatcgagcggatgctgggcacctgtaccttcgaagaggatgagcctagagcacccaaggccagctacaccgccgagtactttagactgctgcagaccgtgaaccacctgaaaaccgttggcagaggcctgcctcctgagttcctggacgaggaacagagaaagctggtggtcgagtttgccctggcctctcctaatggcacatacggccagctgcggaagaagctgtctctgcccgacgatgtgtacttcaacaacctgtactacggcaacaagagcgccgtggaagtggaaaagaaaaagctgggcctgatgccgttctaccacaaagtgcggattgccctggaccacgtgaagaagggcgccatccaagagtttagcgccgagcagctggacaagatcgccagaatcctgacactgtacaagagcgacgacaacagaacccagtacctgcggaaggcccagattcctgagcagtacattcctgaactgctggccctgtctgcctctaaggccgctcacctgtctatcaaggccatgcagaagatgatcccttacctggaagatggctgcacctacgataaggcctgtaccgccgtgtatggcagacacgatggaaagaagcccggcgagaagcggagccagaaactggatattggaatggccggcgagatcacaaacccagtcgttagaagggccgtgtctcagaccatcaaagtgatcaacgccgtcgtcagagagtacggccctcctgaggttgtcagagtggaactggccagagagctgggcaagccttacgagatccggaccaagctggaaaagcggcagagcgccaatttcgagcagaacgccgccatcagaagccagatcgaagagtacaagaaggacacccctaccggcctggacatcgtgaagttcaagctgtaccaagaacagaacggcgtgtgcctgtacagcggcgagaacctggatatcagcagactgtttgaggccggctacgtggacatcgaccacatcatcccttacagcatcagcttcgacgacagctaccacaacaaggtgctcgtgcggagcagagagaacagacagaagggcaacagaatcccctacgcctacttcggccaggacgaagtgcggtggaacagattcgaaaccctggtcaacacccagatcagaagcttcaagaagcggaagaacctgctgtgccacacactgagccctgagcagattgacggcttcaagcagaggaacctggtggacacccagtatctgagcagagtgatcttccggctgatcgatgagcacctggaatttgccgagacaggcaacgtgaagagaaagacccagacagtgaacggggccatcacagcccaagtgcggaagagactgggaatcgacaaagtccgcgccaacggcgatctgcaccatgccaaagatgccgccgtgatcgcctgtatctctcccggcatgatccagaagatcacccggtactcccagagatgcgagtgtgcttggacaagagccggatatgtggactacgaaaccggcgaagtgatgaccaaagaggcctacgacgagaagtacgcccctagattccctgctccttggcctcagttcagagccgaactggaagccagactgtctgtggaccctagaggcgagattgaccagctgaagctggccacctacgacagcgacgaagccctgtttcctgtgttcgtgtccagaatgcccaatcacaaggtgtcaggccccgctcaccaagagactatcagatctggaaagcaggctggcggcaccgtgtctaaagtggctctgagcaccctgaaactggacaaaacaggcgagatccccggctactacagacccgaggatgatcctctgctgtacgaggccctgaaagagagactgagagcctacgatggcaagggcgacaaggccttcgccgagcctttttacaagcccaagcacaatggcgagcctggacctgtggtcaagaaagtgaaggtgttcgacaaggctaccctgaccgtgcctatcaatcacggactggccgccaatggcaatatggtccgagtggacgtgttcagagtcgaggacgagggctactacttcgtgcccatctacgtggccgataccgtgaagggcgaactgccttgtagagccgtggtggcccacaaagctgtggaacagtggaaaggcatggacgagaaggacttcgtgttcagcctgtatgccggcgacctggtgcacattgtgaaccacaaggccatcaaactgaacctggccaagggcgccgagggaaatgaagtggccctgacaaacgacgccctgctgtactacacaggcctgaatattgccacaggcgccctgggactgaccacacacgatagaagatactgtcagagcggcctcggcggcaagacactggacctgattgagaagtaccaggtggacgtgctgggaaactacacacctgtgcggctgcccgagaagagaatgagattccagggatcc

SEQ ID NO: 2044 - DNA, 3444 bp, Artificial Sequence
  OMNI-322 codon optimized for human cells
ggtaccgacaagctgtaccggatcggctttgatatcggcgtgggctctgtgggctacgccgtgctggaaaatgatcccgtgacagaggaccccatcaagatcctgaagctcggcgtgcggacattcagccccaacgaagtgaaagatacaggcgccagcaccgccacagccagaagagagaaaagaggcgtcagaaggcgggccagacggaagaaactgcggatgcagaaactgaaggtgctgatctccagccagctgcagatcgacgtgaaccagatgcagaacaacctgatcaacaaggacgtgtacgagctgagagccaaggctctggacgagaagatcagcaacgacgagctggccaagatcatcctgaatatcgccaagtaccggggcttcaagagcaacagaaagagcagcaaggccagcggcgacgatggaaagctgctgaaggccatcgagaagaacaacaagttcatcaaggacaacggctaccggacctggggcgaagccgtgtacaaggacaagaacttcaagatcaccgtggccggcaacgacttctacaacgtgcggaatcacggcggcgactacaagaactgcgtgcagagaagcgacctggaagaggaactgcggctgattctgaagaagcagcaagagttcaacaacctcatcaccgacgacttcatcgagctgatcattctggtgttcagccggcagcggaacttcgatatcggccctggcaagcagagcccctacttcaaagagaatggcttcgccgacgacgtgggctactgcaccttttacgaggaagaacagagggcccctaaggccagcttcaccttcgagtacttcaacgccctgagcaagatcaacagcctgaagatcggcagcgagttcctgagcctggaacagaagcagaagctgtacgaagagtttaagatcaagaaagagctgagctttgcccagatccggaagatgttcaacttcgacgacgagaagtccttcaacctgtgccggtacaagaccctgtctaagaaagagagagagggcctgaatcaagaggaaatcgtgaacaagaacaaagagctgttcttcgacagcgagaagaaacagaaactggccagcatggaacacagctacgacatcaagaaggccctgggctacgagagcagctacgataacagagagctgatcgacgagatcgcctacatgctgtctgtgtacaagagcgaggaacggatcgacgcctacctgaagtccaacgacaagggcctgttcaccctgctgaacgaggaacaggtgtccaagatcaaagaactgaagttcgacaagttcgccagcctgtctctgaaggctatgaacgagatcatcccctacctgctggaaggcctgagatacgatctggcctgcgagaaggccggcttcaaccacagcagcttcaagttcgagaagctgaagtacctgaagggcgacaagatcaaggccgagttcaaggacctgaccagcaacgttgtgaagagagccgccaatcagaccctgagaatcctcaatgagatcatcaaagagtacggcagccctcagttcgtgtctatcgagctggctagagagctgtcccagctgcctagcgagagaagaaagtccagcgacctgatgatcgccaaccaggataagaacgagcagctgaaagagcggctgcggagcgagttcaatctgatcaaccccaccggcagagacatcctgacactgaagctgtatgaggaacagaacagcaagtccatgtacaccggcaccaagattgaggccgacagactgttcgagcccaactacgtgcagattgaccacatcatcccttacagccggtgcttcgacgatagctacaacaacaaggtgctcgtgatcgccgatgagaatcagaacaagggcgatagaaccccatacgagtactttggcaacgatgagcagcggtggaacgagttcattgtgcgggccaatctgctgcacaacgccaagaaaacccggaacctgctgaagaagaacttctcccaagaagagagcaacgagtttatcaaccgcaacctgaacgacacccagtacgtgtccaagttcctgctcaacctgttccagaaatacctgatgctgaccccgtccaagaagtttaaagagatcaagcagattaagtgcgtgtccggcagcgtgaccagctacctgagaaagtgctggggcatcaagaaaatcagagaggacggcgacatccaccactgcgtggacgctgccattatcgcctctgtgtctgagggcaccgtgcagaagatcaccacgttcaacaaattcaaagaaaagttctttttcgacaaaaaaaacgagcggttcatcagcaaaaagaccggcgaagtgatgaccgccgaggaaaaagagaactacgagaaagagggaatcgagctgctgcggggcacactgcctaaactgtacgatggcttcacccaagagctgaagatccggtccaaagtgaactacttcgacttcaatttcagcgacgaggacaaaaacgccctggtcaagctgggctacagccaagaggaagtggaaagcctgaagcctgtgttcatctcccggatgaagaacgtgaaaaccaccggcgccatccacaaggacaccatgatgagcaccagagagttcgacgagacaaagtgcctgatcaagaccgtgacactggacaacctcaagatcgagaacaaggtggaagaagaacccctcaaggacgacaagtaccccgagaagagaatcgccaactactacaaccccaagaccgaccggctgctgtacctgaaactgaaagaaatgctggtcgagaagggcaagatcctcgacaaggtgtacaagcccaccaagtctggacagcagggacctcttgtgcggaccgtgaagctctacgaaaagtctagcaaccccgtgatcaccaaacacggcgctggcgccaacgataagatgtacagagtggatgtgtatgagaaggccaacaagttttatctgtgccccgtgtacatgtccgacgtgtacaacaagacactgcccaacaaagtgatcattcgggacaagccctgggccgagatcgacgactcctaccagttcaagttcagcctgtaccagaacgacctcatcaaagtgacctccaacaaagaaatcgtcatgaagaaagacaagaaccaccagaacaagctgtccctgaagccagacgagatcaaaaacaacgagttcttcgtgtactacaacagcaccaacatctccaccgccagcatcgaagtgatcagctatgacaactgctactacaaagaaggcctcggcgtcaccacactgaagaatatcgagaagtactacgtggacatcatggggaagatctacaagagccccaaagaggaacgcaagaatttcaacggcctgtacggatcc

SEQ ID NO: 2045 - DNA, 3963 bp, Artificial Sequence
  OMNI-339 codon optimized for human cells
ggtaccaagcagaatggcaatcacgccgccatcggcgactactacattggcctggatgtgggcacaacatctgtcggctgggccgtgaccgacaagcagtacaacatcagcaagttcaagggcaacgccatgtggggcgccagactgtttgatgaagctcagcctgccgccgctcggagatcttctagaacagctagaagaaggctggccagacggaagcagagactgctgctgctggaaatgctgttcgccgaggaactgaacaaggtggacgagagcttcctgatgcggatgagcgaatctgccctgtggcctgaggataagagcgacacctgtcctttcagcctgttcggcggcagagactacaccgacaaggactaccacagacagtaccccaccgtgtaccacctgagaaacgaactggtgcacagcgccgagctgcacgacatcagactggtgtatctggccctgcaccacatcatgaagtccagaggccacttcctgtacgccgactctaatgatggcgaggccatctctgtggaagccgctctgagcgagttctccgagttcgtgtttgccgagtacggcatcagcttcgagcccgctcacagagaggatttcattgcccagctgatctctggcgtgggcgtgacagccaagaagaagctgctgaaggccgctgccgatatcaaggccgatgatgaggccgagatcagcacaacagctctgctggatctgctggctggcgccacagtgaagctgagcgagctgtaccgggacgaagaactgaagtccgccgagattaagagcgtgtgcctgaagaacgacctggacgaggtgttcgatgagctgtctgagctgctgggcgacagagtggaactgatcccacaggccaagagactgttcgatacagccaggctgtcctccatgctgaacggccacaagtacatcagcgaggccaaggtggaactgtacgagcagaacaaggccgacctgaaactgctgaagtcctacgtgcggaaggctgcccctgagcagtataagcacatcttcagcgagaagtccgacaagctggccaactacgccgcctatacagacggcgagtgcaagcaagaggacttctgcaagttcctgaagtctgtgctgcccgagcctgacgatggcgatcctgaggtgcagagaatctacgccagaatcaaggacggcaccctgctgacaagactgaagggcagcgataacggcgtgatcccctaccagctgcacaagaacgagctgaccgagatcctgaagaatgccgagagatacctgcctttcctgaaagagacagacgaggccggactgagcgtgtccgataagatcatcaagaccttcgagttcaggctgccctactacgtgggccctctgaaccctgtgtctcctaatggatgggccgtgcggtttcctgagcacacaggcgagaaggtgtacccctggaacttcgagaaagtgatcgacacagaagccagcgctgccggcttcatcgagaatctgatcggcagatgtacctacaccggcgaaaaggtgctgcccaaggatagcctgctgtactctgagtacgccctgctgaacgagatgaacctgctgagaatcgacggcaagcccctgcctatcgaggactatagaaggctgctggacgaactgttctacaagagcaagaagaaagtcaccaagaagcgcatccggtcctacctgctggccgagggacttattgaagaggccgctgtgatcagcggcgtggacgacaatatcaagtccagcctgaaaagctaccacgacttcaagagcatcctggaaagaaccggcgacgccgacatggtggaagatatcatccgcagcatcctgatcttcggcgacgacaagaaaatgctgcggcggtggctgagcagaagcacccacgatctgaccgacgacgacatcaagtatatctgccggctgaagtacagcgactggggcagactgagcaaggtgttcctgacaggcatctacagccccgatgagtggggcgaagccaagtctatcatggactggctgagactgggcgagagaaacctgatgcagctgatgagcaacgatttcgagtttgctgcccacgctgctgagcacgccgcagaactgtttggcacagatagaaccctgggcgataagctggatgacctgtatatcgctcccagcgtgcggagatccatccggcagacactgaggatcgtggatgagatcgtggacatcaagaaaagcgtgcccgagaagattttcatcgaggtggccagagaaaacgccgacgaaatgaaccggaagcggaccgagagccggaaggaccagctgattacactgtacaagagctgcaaagaggactccggcgagctgttcgagagactggaaaacgaggacgagaacagcctgcggagcgacaaactgttcctgtactacacacagctggggagatgcatgtacagcggcgagcctatcgatttcggagccctgtctagaggcgagatgtacgacatcgaccacatcttcccacagagcaaagtgaaggacaacagcatcgacaaccgggtgctcgtgaagaacggctacaaccgggaaaagaccaacatctaccccatcaacgagagcatccggaccaagatgaggcccatgtgggaccacatgaagaagtacaagctcatctcccagaagaaatacgaccggctgatccgcagcttccctctgactgatgccgagctggaagcctttgtggccagacagctggtggaaaccagacagtctacaaaagccctggccggcctgctgaaagatatcctgggagagaaagtgcggatcgtgtacagcaaggccggcaacgtgtccgacttcagacacgacagcgacttcatcaagtgccgggaagtgaacgatctgcaccacgccaaggacgcctacctgaacatcgtcgtgggcaatgtgtacgacaccagattcaccaagcggttcttcgccaacatccggaacgagaactactccctgaacaaagtgttcgccttcgacaccaaagacgcctgggacacaaagaccagcatggccaccgtgaaaaagtacatggccaagaacaacgtgatcgtgaccagaatgccccgcgaagtgaagggacagctgtttgacctgcaactgatgcctgccggcaaaggccagctggaaaagaagtctggcctgccaatcgataagtacggcggctataacaagctgtccggcgcctacttctgcctggtggaacacaccgagaagaagaagagaatccggacactggaacccgtgtacgtgtacaagaagcagcagttcgaggccgatccagaggaatactgtagacagaccctgggcctgacagagcccaaagtgattgtgaacagaatcctgatcgacagcctgctcgagctgaatggccagaggctgtacgtgaacggcagaaccggggagagactgatcttcaagcactcttaccagctgacactgggctacgagtgggagaagtatatcaagcagctgcagaaatactccgagagatgctacgcccgcagaaccgagctgcctctgacagatcacgacggcatcacccgggacaagaatgaggaactgtatggcctgtttatcgagaagtgccggcagaaagtgtacgctgaactgttcggcaacatgcgggccgatatggaaaaacaccacgagaagttcagcgccatgtccgagctgggccaagtgaatctgctgctcgaggtgctgaaagccttccggtgtaatgcccagaaggccgacttcaccaatctgtgtggcaagggctccgtgggcatcctggttaagtctaaggccgtgtccaagctggacagcgcctacctcgtgaatagaagcgtgaccggcctgtacgagacaaaggtggacctgctgaagggatcc

SEQ ID NO: 2046 - DNA, 4050 bp, Artificial Sequence
  OMNI-354 codon optimized for human cells
ggtaccaagagctacatgcagacagccccttactatatcgccctggacgtgggcacaaattctgttggatgggccgccaccgacaaagagtacaacctgctgagattcaagggcaacagcatgtggggcgtcagactgtttgatgagggccagaccgccgaggaaagacggatcagcagaaccaccagacggcggctgaacagacggaagcagagactgaataccctgtacctgctgttcaaagaggaactggacaagatcgaccccgacttcgacaagcggatgaaggaaagctacctgatcaacgccgacaagaccaccggcaccagattcagcctgttcgccgatcctgactacaccgacaaggatttcgcccgcgagtacaagaccatgtaccacctgagacaagagctggtcaagagcgagaagccccacgacgtccgatgtgtgtatctgggagtgcaccacatcctgaagtccagaggccacttcctgttcgaagtgggcgagaacgccgaagagaacagatccttcgccgaggtgttcgacgagtacctgatcgccatcagagacaacctcggcgtggactgttccgtgtctgatgtgtccgaggtgcacaacatcgtgtccgataagaccatgaagcaggccgagaagatcaagggaatcgtgtccctgatcagcgtggccctggatgagctgaccgaggaaaaagagctgaagaagcagatcgaggccttcgccaagctgatcgtgggagccaacgtggacctgaagaatatgttcggcgacgacaccctgaagggcagcttcaaagtgacagccgacgtggaaggcgacgataagttcaaggacctgagcgacaagcagctgtctgtgatcgccgctgccaagagcgtgtacgaccagatcaagctggaagagatcatgggcagcagcaactacatcagcgactacatggtgtctaagtacgaggaacaccggaaggacatcaaggccctgaaagagttcctgaaaagcaagggcagaatcgacctgtacaagagaatcttcagcgagcggaccaagggcctgaacaattatgccgcctacgtgggctacgagggccaagagtctaattgcaccgccgagaacctgaaggacttcctcaagaaagaactgcaagagtataagtctgagatccccgccatctacgataagatcaccgagggcaagttcgcccctaagctgagaaccaccgataacggcgccattcctagcagcctgcacaaaaaagaactcgtgaagatcctggaaaacgccagcgcctacctgcctttcctgaactctaaggatgccgacggcctgagcgtgaaggacaagattatctccctgttcgacttcaagatcccctactacgtgggacccctgaacaacagcagcgacaagtactggatcgtgcggtccaacgagaagattaccccttggaacttcgaccgggtcgtgaactgcgaggaaaccgccaaagagttcatcctgagaatgaccggcaagtgcacctacaccggggatgatgctctgcctctggatagcctgctgtaccgcgagtataccgtgctgaacgagatcaacgtgatcaagatcaacggcaagcccatcagcaagcgcatcaaggatatcatctacaacgacctgttcgtgaagtcctccaagaaagtgaccaagaaggccatccacacacacctggtcaacctgggcgagatcaccaaggatgatgagatcaccggcgtggccgatacactgacaacaagcctgcagagctaccacaagctgcggagaaccatcgagaagggctacagctccgagctgattgaggaactgatcaagagcatcgtgctgttcgcccaggacaagaaactgctcaagaagtggatcaaagaaaagatgcccgacgccagcgacgaggatatcaagtacctgtccagcctgaagttcagcggctggggctctctgagcaagaccctgctgtgcgacatcatgggaaacctgaacaccgagacaggcgaagtgatgagcgtgatcgacgtgatgagagagaacagcgagaatctgaaccaggtgctgtacaactacggcttcgagaaggccgctaaagagtaccgggaaaacaaatacggcagccaggacaaaatcagcgacatcctggacagcatgtacatcagccccaaagtgcggcggagcatcagacaggccatgaagatcgtggacgagattatcggcatcaagaaggctgcccctgagaagattttcatcgagatggccagagatgtggacggcaccaacaagaaagagcagaccaagtccagaaaagagcagctgatcgagctgtataaggcctgcgaagaggactctgccaagctgctggaagtgtgcggagaggaaggcatcgagagattcaaagaactgtacaacaacctcgagaacatcgaggacagcaagctgagacaggacaagctgtacctgtactacacccagttcggccggtgcatgtactccgacgagtttatccctctggacgagctgcaggataagaacaagtgggacatcgaccacatcttccccagaagccggatcaaggacgacagcctgagcaacagagtgctcgtgaaggcccagctgaaccggtccaagaccaacgagtaccccatcaaccaggacatccgggacaagatgagagacaagtggctggtgctgaagaacaagaagatgatcaacgacaccaagtacagccggctcgtgcggagcgaacctctgacaacagatgagctgtccgccttcatcaaccggcagattgtggaaacccagcagagcacaaaggccctggccacaatcctgggcaagagatgccctgacagcaagatcgtgtacagcaaggccggcaacgtgtccgacttcagaaagtactacgcctacagaagcgaggaaccctacaccgagttcatcaagtgccgggacctgaacgatctgcaccacgccaaggatgcctacctgaacatcgtcgtgggcaacctgtacgataccaagtttaccgccgagtttttcaagaacatccacaacgaggaatactccctcaacaccgaggccatgctgagctggcctgtgaaaggcgcctggattcccgagagcaaggataagacccagggcaccatcctgaccgtgcggaaaaccatgggcaagaacaacatcctgtacaccagaatgcccagagaggaacacggcaagctgttcaacctgacaatcctgaagaaagagaaggactccaacagcggcatgcccgtgaagaaggatcggagcatcgagaactacgggaagtatgacaagatcaaaggggcctacttcgccctggtggaacacaccgagaagaagaagagagtccgcagcctggaacctatcttcatctgtgacaagaccgagtacgagaaggacaataccgccttcttcgagtccaagggctttaaggaccccagagtgatcgtgcccaagatccacatggacagcgtgctggaactgaacggcgtgcggtacaacatcaaggggagaagcgacgacaacatcatctacggccacatgtgccagctggtgctcgattctagagccgtgaccgtgatccggaacaccacaaagtacctgcagcggatgagcaagcagaaggataagaaagagcccaccagatacgacggcatcacagccgaggacaacatctacctgatgggatgcctgatcgacaagattgacaaagtcaaggactacaacaagtccatcaaatgctcccggatcatcctcgaggccgaaaagaagaactttgagaacggcagctacaccctgtacgagcagtgcgtgtccatctccaaggctctgatcggcttccggtgcaatcagagagtgtctggctacaacggcagcaccatccggatcaacaagaaggtgtcctctctgtcctccgcctacctcgtgaatcagagccctaccggcctgtatgagtataagattgacctgctgaaggacggatcc

SEQ ID NO: 2047 - RNA, 90 nt, Artificial Sequence
  OMNI-75 sgRNA scaffold
guuuuuguacucucaacaugaaaugauugagaaucuacaaggauaaggcuuuaugccgaaaucauuaacucgccuuugggcgaguuuuuu

SEQ ID NO: 2048 - RNA, 80 nt, Artificial Sequence
  OMNI-79 sgRNA scaffold
guugccgcuggagaaauccaguuguuaacaagcagcuugacugcaccaaauaaggcgggggcugcggcccucgcuuuuuu

SEQ ID NO: 2049 - RNA, 99 nt, Artificial Sequence
  OMNI-91 sgRNA scaffold
guuguaguccccucguagugaaaacuaucaggucacuacaauaaaguagaacacugaaaagcucugacggcccacuuuccgugggucgucaucuuuuuu

SEQ ID NO: 2050 - RNA, 125 nt, Artificial Sequence
  OMNI-93 sgRNA scaffold
gucuuaguacucuguuggaaacaacaauaguucuaagauaaggcuauuuaugccguaggguauggugguaucccuuuaauccaccuuuaagccauugcuuaugcaauggcuuaucuauauuuuuu

SEQ ID NO: 2051 - RNA, 107 nt, Artificial Sequence
  OMNI-103 sgRNA scaffold
guuugagaguaguguaagaaauuacacuacaaguucaaauaaaaauuuauucaaauccauuugcuacauuguguagaauuuaaagaucuggcaacagaucuuuuuuu

SEQ ID NO: 2052 - RNA, 103 nt, Artificial Sequence
  OMNI-104 sgRNA scaffold
guugcaccuagacaccgagaaaucggugucuuuguguuaauaagaaccuuucuuuggaaaggaguucaccauuuacaaacaggcacuucggugucuguuuuuu

SEQ ID NO: 2053 - RNA, 112 nt, Artificial Sequence
  OMNI-120 sgRNA scaffold
guuugagagccuuguuagaaauaacaaggcgagugcaaauaagguuuaaccgaauucaccguuuauggaccgcauugugcggauuuaaaaaaagacuuucaaagucuuuuuu

SEQ ID NO: 2054 - RNA, 119 nt, Artificial Sequence
  OMNI-124 sgRNA scaffold
guuuaaguaccuggagaaagaaauuucuucagaccuacuuaaauaaggauuuauuccgaaagaauuauuguaaaugaagaaaauaaggcgagaaaggaugcugacgggcauccuuuuuu

SEQ ID NO: 2055 - RNA, 104 nt, Artificial Sequence
  OMNI-125 sgRNA scaffold
guugugaauggcuuucgaaauugaagccauucacaauaaggauuauuccguugugaaaacauuaagagcgggucgugagacucgcucuucuguguuuauuuuuu

SEQ ID NO: 2056 - RNA, 101 nt, Artificial Sequence
  OMNI-126 sgRNA scaffold
guuguggcuuguugaagaagaaauucuucaacuugucacaauaaggcccuuaaggccgaagguugaaaaaccuauggcucuacuucgguggagccuuuuuu

SEQ ID NO: 2057 - RNA, 87 nt, Artificial Sequence
  OMNI-127 sgRNA scaffold
guuuaguuaccauauggaugaaaaucuauaugaccuaacuaaacaaggguuuaucccggauucggcuccuuuauaggagccuuuuuu

SEQ ID NO: 2058 - RNA, 121 nt, Artificial Sequence
  OMNI-131 sgRNA scaffold
guuugagaaugauguaagaaauuacaucauaaguucaaauaacgauuuaucgaagacgccguuuauaacggcccacagugaguggaaagaaagcuguugcucauaggagcagcaguuuuuu

SEQ ID NO: 2059 - RNA, 106 nt, Artificial Sequence
  OMNI-132 sgRNA scaffold
guuugagaguaguguaagaaauuacacuacaaguucaaauaaaaauuuauucaaauccauuugcuacauuguguagaauuuaaagaucuggcaacagaucuuuuuu

SEQ ID NO: 2060 - RNA, 101 nt, Artificial Sequence
  OMNI-138 sgRNA scaffold
guuguaguucccuaauuaugaaaacaauuagguuacuaugauaagguaguauaccgcaaagcucuaacgccucaucuuaaugauggggcguuaucuuuuuu

SEQ ID NO: 2061 - RNA, 99 nt, Artificial Sequence
  OMNI-159 sgRNA scaffold
guuguaguucccuauuugugaaaacaauuagguuacuaugauaagguaguauaccgcaaagcucuaacgccccgucuuugacggggcguuaucuuuuuu

SEQ ID NO: 2062 - RNA, 98 nt, Artificial Sequence
  OMNI-169 sgRNA scaffold
guugugaauugcuuucaaagaaaugugaaagcucuucacaauaaggcuauaagccacagaucuuucuaacuccugcguacuccgugggaguauuuuuu

SEQ ID NO: 2063 - RNA, 101 nt, Artificial Sequence
  OMNI-173 sgRNA scaffold
guugugaauugcuuucgaaagaaagcaauucacaauaaggauuauuccguugugaaaacucuuagguucuagucugucguccuuuaucggcagacuuuuuu

SEQ ID NO: 2064 - RNA, 101 nt, Artificial Sequence; identical to SEQ ID NO: 2063
  OMNI-174 sgRNA scaffold

SEQ ID NO: 2065 - RNA, 101 nt, Artificial Sequence; identical to SEQ ID NO: 2063
  OMNI-175 sgRNA scaffold

SEQ ID NO: 2066 - RNA, 98 nt, Artificial Sequence
  OMNI-185 sgRNA scaffold
guugugauuagcugaagaaauucagcuaaucacaauaaggauuauuccguugugaaaacauucggaucgcccaucauccuaauggugggcacuuuuuu

SEQ ID NO: 2067 - RNA, 90 nt, Artificial Sequence
  OMNI-215 sgRNA scaffold
guugugauuugcuuuagaaauaagcaaaucacaauaaggauucuauccguugugaaaacauuucgggaggggcaacucucccgcuuuuuu

SEQ ID NO: 2068 - RNA, 92 nt, Artificial Sequence
  OMNI-218 sgRNA scaffold
guugugguuugaugaugaaaaucaucaaaucacaauaaggcuauaugccgaaggaugaauuccuaucgccucucuucuggagaggcuuuuuu

SEQ ID NO: 2069 - RNA, 89 nt, Artificial Sequence
  OMNI-231 sgRNA scaffold
guuugagaguaauguaggaaauuacauuacaaguucaaauaacgauuuaaucgaaaccaccuuucuagguacugcgguugcaguuuuuu

SEQ ID NO: 2070 - RNA, 84 nt, Artificial Sequence
  OMNI-247 sgRNA scaffold
guuugaguguaauguagaaauacauuacaaaguucaaauaagcuuuaagcgaaaucauagagaagcagugcuucucauuuuuuu

SEQ ID NO: 2071 - RNA, 84 nt, Artificial Sequence; identical to SEQ ID NO: 2070
  OMNI-250 sgRNA scaffold

SEQ ID NO: 2072 - RNA, 115 nt, Artificial Sequence
  OMNI-266 sgRNA scaffold
guuauaguugccuuucgaaagaaaggcgacuauaauaaucgagaaauuucgaguaaggcucuaacguuuacacguuauccgaaaagcagccgguucgccgguugcuucuuuuuuu

SEQ ID NO: 2073 - RNA, 96 nt, Artificial Sequence
  OMNI-269 sgRNA scaffold
gcuauaguuuccuuucgaagaaauucgaaacguuacuauaguaagaaauucucgaaaaguucugccuaauacuauuauguauuaggcaucuuuuuu

SEQ ID NO: 2074 - RNA, 95 nt, Artificial Sequence
  OMNI-274 sgRNA scaffold
guuauaguuuccuuucgaagaaauuugaaacguuacuauaauaagaaaguuucgugaaguucuguccgauaaucuuaucggacaucuucuuuuuu

SEQ ID NO: 2075 - RNA, 92 nt, Artificial Sequence
  OMNI-281 sgRNA scaffold
guucuaguacucuguaauugaaaaauuacagaaucuacuagaacaagacaauaugucguguuuagcccaucaauuuauuggugggcuuuuuu

SEQ ID NO: 2076 - RNA, 98 nt, Artificial Sequence
  OMNI-293 sgRNA scaffold
auuguaguucccuaauuucgaaaacaaauuagguugcuacaaaaagguagaaaaccgaaaagcucugacggcuccuucuuggagccguuaucuuuuuu

SEQ ID NO: 2077 - RNA, 116 nt, Artificial Sequence
  OMNI-295 sgRNA scaffold
guucuagucccuuguugaaaaacaagggacuagaauaaggggagugggcaucccgcagggugaugcuugugucaagggggcaagcuagucaaucccuaagcccacccgcauuuuuu

SEQ ID NO: 2078 - RNA, 99 nt, Artificial Sequence
  OMNI-308 sgRNA scaffold
guuguaguucccuaauuuugaaaauuauuagguuacuaugauaagguaguacaccgaaaagcucuaacgcucugucuuggacagagcguuaucuuuuuu

SEQ ID NO: 2079 - RNA, 134 nt, Artificial Sequence
  OMNI-309 sgRNA scaffold
guugugguucccuguucuugaaagagaacauguguuaccgcaauaagguaaaacaccacaaagcacugccccagccuaacggcuggggcaucuuuguagauaaauauuaggcaaaggagcugacaucauuuuuu

SEQ ID NO: 2080 - RNA, 98 nt, Artificial Sequence
  OMNI-322 sgRNA scaffold
guucuaguuucuuaauuaugaaauuaauuaagcuacuagaauaauggcaggcgaaagccuuguccaguaagugaccaccuuauggguggucuuuuuuu

SEQ ID NO: 2081 - RNA, 114 nt, Artificial Sequence
  OMNI-339 sgRNA scaffold
guuugagaguaguguaagaaauuacacuacaaguucaaauaagcuuauagcgaaaucaucgcauugcgaacucacagugggugagcgaaaaagacuccuucgggagucuuuuuu

SEQ ID NO: 2082 - RNA, 115 nt, Artificial Sequence
  OMNI-354 sgRNA scaffold
guuugagaguaguguaagaaauuacacuacaaaguucaaauaagcuucuagcgaaaucaucgcaaugcgaaugcacagugugugcucaguaagaccucauuacgaggucuuuuuu

SEQ ID NO: 2083 - DNA, 6373 bp, Artificial Sequence
  pET9a-OMNI-103
taatacgactcactatagggagaccacaacggtttccctctagagagacaataaccctgataatgcttcaataatattgaaaaaggaagagtatgcctaagaagaagagaaaggtgggtacctctatcaagagcgactacttcctgggcctcgacatcggcacagattctatcggatgggccgtgacagaccccgagtaccacatcctgagaagaaagggcaaagccctgtggggcatcagactgttcgatgccgccaatactgccgccgagagaagaaccttccggaccagcagaagaagaatccagcggcggagacagcggatcagactgctgcaagagctgttcgccgaggaaatggttaagctggaccccggcttcttccagagactgagcgatagcgccttctggcaagaggacaagcaagagcagcagatctacagcctgtttacctgcgagaactacaccgacgtggactactacagagagtaccccaccatctaccacctgagaagcgccctgatccaagagaaaaaagagttcgacctgcggctgctgtatctggccctgcaccatctgatgaagcaccggggccactttctgttcaacggcagcatcaacaacgtgaccagcttccacaccaccttccagaccttcgccgactgcctgtacgacgagttcgacatcgagctggaatgcgacagcgaggacagattcgccgagatcctgaaggataagcacgccagaaagaccggcaagtgctctgagctggaaatcatctgccacatcgagaagtccaacaagcagctgaaagaactgttcaagctgatcaccggcatgaaggccagcctgagcgtggtgtttggagatgatgagctggccgagatcgagcacaacaagatcagcttcagcgagagcagctacgacgaagtgcggctggccctggaagatgagattcaagagagaaccggcatcctggacatcttccacgccgtgtattcttgggccatcctggccgatattctggaaggcggcgagtacgagggcaacagctatctgtctgtggccaaggtgtccacctacaagaagcacggcgacgacctgagactgctgagaacactcgtgcgcgagtactgccccgaccactacaagagctttttcagcgtgtccggcaaagagaactactgcgcctacgccggcacactgaagaagaacggcaagaagcagcccatcaagcggtgcagccaagaggacttctacaaggccctgaagaaactgctgaaccagatgcctaccgagcagcccgaagtgaaggatatcttcatcgagattgagaacggcaccttcctgcctctgcaagtgtccaaggacaacggcgtgatcccctaccaagtgaacaagatggaactcgagaagatcctgcagaacgccgaagagtacctgcctttcctgaagaacatcgacgaggaatgcggcaagaccgtgtccaagaagatcatcgacctgttcgagttcagaatcccctactacgtgggccctctgaataccgccaagggcgagaattgctggatggttcgaaaagaggccggcagaatctacccctggaacttcgatgagaaggtggacagagatcagagcgccgagaagttcatcagacggatgaccaaccagtgcacctacctgatccacgaggacgtggtgcctaagaacagcctgctgtactccgagttcatggtgctgaacgagctgaacaatgtgaagattcggagcgagaagctgcccgtggaactgaagcaggccatcgtgctggacctgtttaagaagcagaagcagatcacagggaagaagctgctcaactacctgaacgccaacggctacgacgtgaagaaagaggacctgagcggcttcgacggcaacttcaagtccagcctgtccagctacctgactctgaagaaggtgttcggagaggaactggacaagtacagcgtgcagcagatggccgaggacatcatcctgtggatcaccctgtatggcgacgatcagaaaatgctgcggagagtgatccggaagcactacgagcagcagctgtctgaggaacagatcctgagcctgagcaagctgaagttccaaggctggggcagactgtctagacggctgctctctgaaatggaaggcgtggactgtgaaaccggcgagtgcatgacagtgatgcagggcctgagaaacacccagaacaacctgatgcagctgctgagccagcagttcagcttcatggaactgatcgaggaagagaacgggaactactacgtcgacgagatcacctacgacaacctggtcaaggacatggtcatcagccctagcgtgaaaagggccgtgtggcagacagtgcagatcgtggaagaaatcaagggcgtgatgggatgccagcctaagaaaatcttcgtggaaatggcccgcagcgacgaagagaagaaacggaccgtgtctcggaaggatcggctgctggaagcctacgacgccatcaaggatgaggcccggcaatggcaagaagaactgcagaaatactccgacggcgatttcaaggccatcaagctgtacctgtactacacccagatgggccagtgcatgtacaccggcagaaaaatcgatctgtcccagctgaacgacgccaccgtgtgggatagagatcacatctaccctcagagcaagaccaaggacgacagcctggacaatctggtgctggtggatagatccgtgaatgccaagaaaagcgacggcatgctgagccccgagatccagcagagaatgagagccacctggaagtacctgaaagaaaagaagctcatcagcgagaagaagtacgagcggctgaccagagtgtcccctctgacagatgaagaactggccggcttcatcaaccggcagctggtggaaacaagacagagcagcaaagccgtggccacactgctgaagagggtgtacgatgaggccgagattgtgtatgtgaaggccgaggccgtgtctaacttccggcgggataacctggactacatcaaagtgcgggacctgaacgactaccaccacgccaaggacgcctaccagaacatcgtcgtgggcaacgtgttccacgagaagtttaccagcaatcccctgcggtggctgaaaaacaaccccaacaccaagtactccctcaaccagatgttcaacttcgacctggaaaagaacggcgtggtcatctggaagagaggcaaggccggctccattaagtgtgtggaagagacactgaagcggaacgacatcctgttcaccagatacgctttctgcaacaaaggcggcttctttaatcagatgctgaccgccgctccagaggataagacaaaggccaaaggcctggtgcctatcaagaaaggcatggaaacctggaaatacggcggctacaccagcgtgacccctagccactttatgctggtggccagcaaggacaagaagggaaaagagatccggaccatcgagacagtgcccctgtaccggtggaaagagttcaaagagaatcccgacgctctgctccagtactgcagagagttctacggcctgaaagagcccaaggttctgatcccttgcatcaagaagaatgcccggctggtcgtgaacggcttccctatgcacctgaagggcagcaccggaaaacagctgattctgcagggtgccgtgcagctgtgcctgaacaacgagaacatcaagtacctcaagaaagtgacgaagtacctcgagtacaacgcccagcggagagacaagagaaccctgctcgaagttcgggaagtgaccggaatcaacaaagaggaaaacatccagctgtacgatgtgttcgtggacaagctgagcaacacaatctaccagtacagacccgccaatcctaaggacaacctcatcaagggccgcgagaaattcatcgagcttggcctggctgagcagtgcgtggtgctgggagaagtgctgcatctgttccagtgcaagcccctgaccagcgatctgacactgatcggcggaagccctaacaccggcaccatcaagatcaccaagaccatcagcaactgcaacgtggtcaagctgctgtcccagtctatcgccggcgtgaaagtccgcgagatcaacctgctgatcatcggatcctacccatacgatgttccagattacgcggccgctccaaaaaagaaaagaaaagttgcggctagccatcatcaccatcaccatcatcattaaggctgctaacaaagcccgaaaggaagctgagttggctgctgccaccgctgagcaataactagcataaccccttggggcctctaaacgggtcttgaggggttttttgctgaaaggaggaactatatccggatatccacaggacgggtgtggtcgccatgatcgcgtagtcgatagtggctccaagtagcgaagcgagcaggactgggcggcggccaaagcggtcggacagtgctccgagaacgggtgcgcatagaaattgcatcaacgcatatagcgctagcagcacgccatagtgactggcgatgctgtcggaatggacgatatcccgcaagaggcccggcagtaccggcataaccaagcctatgcctacagcatccagggtgacggtgccgaggatgacgatgagcgcattgttagatttcatacacggtgcctgactgcgttagcaatttaactgtgataaactaccgcattaaagcttatcgatgataagctgtcaaacatgagaattcttagaaaaactcatcgagcatcaaatgaaactgcaatttattcatatcaggattatcaataccatatttttgaaaaagccgtttctgtaatgaaggagaaaactcaccgaggcagttccataggatggcaagatcctggtatcggtctgcgattccgactcgtccaacatcaatacaacctattaatttcccctcgtcaaaaataaggttatcaagtgagaaatcaccatgagtgacgactgaatccggtgagaatggcaaaagcttatgcatttctttccagacttgttcaacaggccagccattacgctcgtcatcaaaatcactcgcatcaaccaaaccgttattcattcgtgattgcgcctgagcgagacgaaatacgcgatcgctgttaaaaggacaattacaaacaggaatcgaatgcaaccggcgcaggaacactgccagcgcatcaacaatattttcacctgaatcaggatattcttctaatacctggaatgctgttttcccggggatcgcagtggtgagtaaccatgcatcatcaggagtacggataaaatgcttgatggtcggaagaggcataaattccgtcagccagtttagtctgaccatctcatctgtaacatcattggcaacgctacctttgccatgtttcagaaacaactctggcgcatcgggcttcccatacaatcgatagattgtcgcacctgattgcccgacattatcgcgagcccatttatacccatataaatcagcatccatgttggaatttaatcgcggcctcgagcaagacgtttcccgttgaatatggctcataacaccccttgtattactgtttatgtaagcagacagttttattgttcatgaccaaaatcccttaacgtgagttttcgttccactgagcgtcagaccccgtagaaaagatcaaaggatcttcttgagatcctttttttctgcgcgtaatctgctgcttgcaaacaaaaaaaccaccgctaccagcggtggtttgtttgccggatcaagagctaccaactctttttccgaaggtaactggcttcagcagagcgcagataccaaatactgtccttctagtgtagccgtagttaggccaccacttcaagaactctgtagcaccgcctacatacctcgctctgctaatcctgttaccagtggctgctgccagtggcgataagtcgtgtcttaccgggttggactcaagacgatagttaccggataaggcgcagcggtcgggctgaacggggggttcgtgcacacagcccagcttggagcgaacgacctacaccgaactgagatacctacagcgtgagctatgagaaagcgccacgcttcccgaagggagaaaggcggacaggtatccggtaagcggcagggtcggaacaggagagcgcacgagggagcttccagggggaaacgcctggtatctttatagtcctgtcgggtttcgccacctctgacttgagcgtcgatttttgtgatgctcgtcaggggggcggagcctatggaaaaacgccagcaacgcggcctttttacggttcctggccttttgctggccttttgctcacatgttcgatcccgcgaaat

SEQ ID NO: 2084 - DNA, 2783 bp, Artificial Sequence
  pShuttle Guide-T2-OMNI-103 V2
tacacggtgcctgactgcgttagcaatttaactgtgataaactaccgcattaaagcttatcgatgataagctgtcaacacatttccccgaaaagtgccacctgacgtcctcgagtcccgcataatcgaaatgagggcctatttcccatgattccttcatatttgcatatacgatacaaggctgttagagagataattagaattaatttgactgtaaacacaaagatattagtacaaaatacgtgacgtagaaagtaataatttcttgggtagtttgcagttttaaaattatgttttaaaatggactatcatatgcttaccgtaacttgaaagtatttcgatttcttggctttatatatcttgctaatacgactcactataggaagagcagagccttggtctcgtttgagagtagtgtaagaaattacactacaagttcaaataaaaatttattcaaatccatttgctacattgtgtagaatttaaagatctggcaacagatctttttttgaattctctagcataaccccttggggcctctaaacgggtcttgaggggttttttgacctaggctaggggatatattccgggtaccccgcttcctcgctcactgactcgctacgctcggtcgttcgactgcggcgagcggaaatggcttacgaacggggcggagatttcctggaagatgccaggaagatacttaacagggaagtgagagggccgcggcaaagccgtttttccataggctccgcccccctgacaagcatcacgaaatctgacgctcaaatcagtggtggcgaaacccgacaggactataaagataccaggcgtttccccctggcggctccctcgtgcgctctcctgttcctgcctttcggtttaccggtgtcattccgctgttatggccgcgtttgtctcattccacgcctgacactcagttccgggtaggcagttcgctccaagctggactgtatgcacgaaccccccgttcagtccgaccgctgcgccttatccggtaactatcgtcttgagtccaacccggaaagacatgcaaaagcaccactggcagcagccactggtaattgatttagaggagttagtcttgaagtcatgcgccggttaaggctaaactgaaaggacaagttttggtgactgcgctcctccaagccagttacctcggttcaaagagttggtagctcagagaaccttcgaaaaaccgccctgcaaggcggttttttcgttttcagagcaagagattacgcgcagaccaaaacgatctcaagaagatcatcttattaatcagataaaatatttctagatttcagtgcaatttatctcttcaaatgtagcacctgaagtcagccccatacgatataagttgttactagtgcttggattctcaccaataaaaaacgcccggcggcaaccgagcgttctgaacaaatccagatggagttctgaggtcattactggatctatcaacaggagtccaagcgagaagggttggtttgcgcattcacagttctccgcaagaattgattggctccaattcttggagtggtgaatccgttagcgaggtgccgccggcttccattcaggtcgaggtggcccggctccatgcaccgcgacgcaacgcggggaggcagacaaggtatagggcggcgcctacaatccatgccaacccgttccatgtgctcgccgaggcggcataaatcgccgtgacgatcagcggtccaatgatcgaagttaggctggtaagagccgcgagcgatccttgaagctgtccctgatggtcgtcatctacctgcctggacagcatggcctgcaacgcgggcatcccgatgccgccggaagcgagaagaatcataatggggaaggccatccagcctcgcgtcgcgaacgccagcaagacgtagcccagcgcgtcggccgccatgccggcgataatggcctgcttctcgccgaaacgtttggtggcgggaccagtgacgaaggcttgagcgagggcgtgcaagattccgaataccgcaagcgacaggccgatcatcgtcgcgctccagcgaaagcggtcctcgccgaaaatgacccagagcgctgccggcacctgtcctacgagttgcatgataaagaagacagtcataagtgcggcgacgatagtcatgccccgcgcccaccggaaggagctgactgggttgaaggctctcaagggcatcggtcgacgctctcccttatgcgactcctgcattaggaagcagcccagtagtaggttgaggccgttgagcaccgccgccgcaaggaatggtgcatgcaaggagatggcgcccaacagtcccccggccacggggcctgccaccatacccacgccgaaacaagcgctcatgagcccgaagtggcgagcccgatcttccccatcggtgatgtcggcgatataggcgccagcaaccgcacctgtggcgccggtgatgccggccacgatgcgtccggcgtagaggatccacaggacgggtgtggtcgccatgatcgcgtagtcgatagtggctccaagtagcgaagcgagcaggactgggcggcggccaaagcggtcggacagtgctccgagaacgggtgcgcatagaaattgcatcaacgcatatagcgctagcagcacgccatagtgactggcgatgctgtcggaatggacgatatcccgcaagaggcccggcagtaccggcataaccaagcctatgcctacagcatccagggtgacggtgccgaggatgacgatgagcgcattgttagatttca

SEQ ID NO: 2085 - DNA, 5009 bp, Artificial Sequence
  pbPOS T2 library
  misc_feature (3040)..(3047): n is a, c, g, or t
tcgagtctttacactttatgcttccggctcgtatgttgtgtggaattgtgagcggataacaatttcacacatgattacggattcaacgtcgtgactggtaaaacccgggcgttacccaacttaatcgccttgcagcacatccccctttcgccagcaggcgtaataaggaaaggattcatgtactatttgaaaaacacaaacttttggatgttcggtttattctttttcttttacttttttatcatgggagcctacttcccgtttttcccgatttggctacatgatatcaaccatatcagcaaaagtgatacgggtattatttttgccgctatttctctgttctcgctattattccaaccgctgtttggtctgctttctgacaaactcggtctacgcaaatacctgctgtggattattaccggcatgttagtgatgtttgcgccgttctttatttttatcttcgggccactgctgcagtacaacattttagtagggtcgattgttggtggtatttatctaggctttagttttaacgccggtgcgccagcagtagaggcatttattgagaaagtcagccggcgcagtaatttcgaatttggtcgcgcgcggatgtttggcagtgttggctgggcgctggttgcctcgattgtcgggatcatgttcaccattaataatcagtttgttttctggctgggctctggcagttgtctcatcctcgccgttttactctttttcgccaaaacggacgcgccctcaagtgccacggttgccaatgcggtaggtgccaaccattcggcatttagccttaagctggcactggaactgttcagacagccaaaactgtggtttttgtcactgtatgttattggcgtttcctccacctacgatgtttttgaccaacagtttgctaatttctttacttcgttctttgctaccggtgaacagggtacccgcgtatttggctacgtaacgacaatgggcgaattacttaacgcctcgattatgttctttgcgccactgatcattaatcgcatcggtgggaagaatgccctgctgctggctggcactattatgtctgtacgtattattggctcatcgttcgccacctcagcgctggaagtggttattctgaaaacgctgcatatgtttgaagtaccgttcctgctggtgggctcctttaaatatattactagtcagtttgaagtgcgtttttcagcgacgatttatctggtcagtttcagcttctttaagcaactggcgatgatttttatgtctgtactggcgggcaatatgtatgaaagcataggtttccaaggcgcttatctggtgctgggtctggtggcgctgggcttcaccttaatttccgtgttcacgcttagcggcccgggcccgctttccctgctgcgtcgtcaggtgaatgaagtcgcttaaaggcctcgatgcagctagcatgctaatctgattcgttaccaattatgacaacttgacggctacatcattcactttttcttcacaaccggcacggaactcgctcgggctggccccggtgcattttttaaatacccgcgagaaatagagttgatcgtcaaaaccaacattgcgaccgacggtggcgataggcatccgggtggtgctcaaaagcagcttcgcctggctgatacgttggtcctcgcgccagcttaagacgctaatccctaactgctggcggaaaagatgtgacagacgcgacggcgacaagcaaacatgctgtgcgacgctggcgatatcaaaattgctgtctgccaggtgatcgctgatgtactgacaagcctcgcgtacccgattatccatcggtggatggagcgactcgttaatcgcttccatgcgccgcagtaacaattgctcaagcagatttatcgccagcagctccgaatagcgcccttccccttgcccggcgttaatgatttgcccaaacaggtcgctgaaatgcggctggtgcgcttcatccgggcgaaagaaccccgtattggcaaatattgacggccagttaagccattcatgccagtaggcgcgcggacgaaagtaaacccactggtgataccattcgcgagcctccggatgacgaccgtagtgatgaatctctcctggcgggaacagcaaaatatcacccggtcggcaaacaaattctcgtccctgatttttcaccaccccctgaccgcgaatggtgagattgagaatataacctttcattcccagcggtcggtcgataaaaaaatcgagataaccgttggcctcaatcggcgttaaacccgccaccagatgggcattaaacgagtatcccggcagcaggggatcattttgcgcttcagccatacttttcatactcccgccattcagagaagaaaccaattgtccatattgcatcagacattgccgtcactgcgtcttttactggctcttctcgctaaccaaaccggtaaccccgcttattaaaagcattctgtaacaaagcgggaccaaagccatgacaaaaacgcgtaacaaaagtgtctataatcacggcagaaaagtccacattgattatttgcacggcgtcacactttgctatgccatagcatttttatccataagattagcggatcctacctgacgctttttatcgcaactctctactgtttctccatacccgtttttttggggtagcgattgaaaacgatgcagtttaaggtttacacctataaaagagagagccgttatcgtctgtttgtggatgtacagagtgatattattgacacgcccgggcgacggatggtgatccccctggccagtgcacgtctgctgtcagataaagtctcccgtgaactttacccggtggtgcatatcggggatgaaagctggcgcatgatgaccaccgatatggccagtgtgccggtctccgttatcggggaagaagtggctgatctcagccaccgcgaaaatgacatcaaaaacgccattaacctgatgttttggggaatataatcttctagacatacaatggaagagcagagccttggtctcnnnnnnnnaagcttgatatcgaattcctgcagcccgggggatcccatggtacgcgtgctagaggcatcaaataaaacgaaaggctcagtcgaaagactgggcctttcgttttatctgttgtttgtcggtgaacgctctcctgagtaggacaaatccgccgccctagacctaggcgttcggctgcggcgagcggtatcagctcactcaaaggcggtaatacggttatccacagaatcaggggataacgcaggaaagaacatgtgagcaaaaggccagcaaaaggccaggaaccgtaaaaaggccgcgttgctggcgtttttccataggctccgcccccctgacgagcatcacaaaaatcgacgctcaagtcagaggtggcgaaacccgacaggactataaagataccaggcgtttccccctggaagctccctcgtgcgctctcctgttccgaccctgccgcttaccggatacctgtccgcctttctcccttcgggaagcgtggcgctttctcaatgctcacgctgtaggtatctcagttcggtgtaggtcgttcgctccaagctgggctgtgtgcacgaaccccccgttcagcccgaccgctgcgccttatccggtaactatcgtcttgagtccaacccggtaagacacgacttatcgccactggcagcagccactggtaacaggattagcagagcgaggtatgtaggcggtgctacagagttcttgaagtggtggcctaactacggctacactagaaggacagtatttggtatctgcgctctgctgaagccagttaccttcggaaaaagagttggtagctcttgatccggcaaacaaaccaccgctggtagcggtggtttttttgtttgcaagcagcagattacgcgcagaaaaaaaggatctcaagaagatcctttgatcttttctacggggtctgacgctcagtggaacgaaaactcacgttaagggattttggtcatgactagtgcttggattctcaccaataaaaaacgcccggcggcaaccgagcgttctgaacaaatccagatggagttctgaggtcattactggatctatcaacaggagtccaagcgagctcgatatcaaattacgccccgccctgccactcatcgcagtactgttgtaattcattaagcattctgccgacatggaagccatcacagacggcatgatgaacctgaatcgccagcggcatcagcaccttgtcgccttgcgtataatatttgcccatggtgaaaacgggggcgaagaagttgtccatattggccacgtttaaatcaaaactggtgaaactcacccagggattggctgagacgaaaaacatattctcaataaaccctttagggaaataggccaggttttcaccgtaacacgccacatcttgcgaatatatgtgtagaaactgccggaaatcgtcgtggtattcactccagagcgatgaaaacgtttcagtttgctcatggaaaacggtgtaacaagggtgaacactatcccatatcaccagctcaccgtctttcattgccatacggaattccggatgagcattcatcaggcgggcaagaatgtgaataaaggccggataaaacttgtgcttatttttctttacggtctttaaaaaggccgtaatatccagctgaacggtctggttataggtacattgagcaactgactgaaatgcctcaaaatgttctttacgatgccattgggatatatcaacggtggtatatccagtgatttttttctccattttagcttccttagctcctgaaaatctcgataactcaaaaaatacgcccggtagtgatcttatttcattatggtgaaagttggaacctcttacgtgccgatcaacgtctcattttcgccagatatcgacgtctaagaaaccattattatcatgacattaacctataaaaataggcgtatcacgaggccctttcgtcttcacc

SEQ ID NO: 2086 - protein, 9 aa, Artificial Sequence
  HA-tag
YPYDVPDYA

SEQ ID NO: 2087 - protein, 7 aa, Artificial Sequence
  NLS
PKKKRKV

SEQ ID NO: 2088 - protein, 19 aa, Artificial Sequence
  P2A
ATNFSLLKQAGDVEENPGP

SEQ ID NO: 2089 - protein, 236 aa, Artificial Sequence
  mCherry
MVSKGEEDNMAIIKEFMRFKVHMEGSVNGHEFEIEGEGEGRPYEGTQTAKLKVTKGGPLPFAWDILSPQFMYGSKAYVKHPADIPDYLKLSFPEGFKWERVMNFEDGGVVTVTQDSSLQDGEFIYKVKLRGTNFPSDGPVMQKKTMGWEASSERMYPEDGALKGEIKQRLKLKDGGHYDAEVKTTYKAKKPVQLPGAYNVNIKLDITSHNEDYTIVEQYERAEGRHSTGGMDELYK

SEQ ID NO: 2090 - DNA, 27 bp, Artificial Sequence
  HA-tag
tacccatacgatgttccagattacgct

SEQ ID NO: 2091 - DNA, 21 bp, Artificial Sequence
  NLS
ccaaaaaagaaaagaaaagtt

SEQ ID NO: 2092 - DNA, 57 bp, Artificial Sequence
  P2A
gccaccaacttcagcctgctgaagcaggccggcgacgtggaggagaaccccggcccc

SEQ ID NO: 2093 - DNA, 711 bp, Artificial Sequence
  mCherry
atggtgagcaagggcgaggaggataacatggccatcatcaaggagttcatgcgcttcaaggtgcacatggagggctccgtgaacggccacgagttcgagatcgagggcgagggcgagggccgcccctacgagggcacccagaccgccaagctgaaggtgaccaagggtggccccctgcccttcgcctgggacatcctgtcccctcagttcatgtacggctccaaggcctacgtgaagcaccccgccgacatccccgactacttgaagctgtccttccccgagggcttcaagtgggagcgcgtgatgaacttcgaggacggcggcgtggtgaccgtgacccaggactcctccctgcaggacggcgagttcatctacaaggtgaagctgcgcggcaccaacttcccctccgacggccccgtaatgcagaagaagaccatgggctgggaggcctcctccgagcggatgtaccccgaggacggcgccctgaagggcgagatcaagcagaggctgaagctgaaggacggcggccactacgacgctgaggtcaagaccacctacaaggccaagaagcccgtgcagctgcccggcgcctacaacgtcaacatcaagttggacatcacctcccacaacgaggactacaccatcgtggaacagtacgaacgcgccgagggccgccactccaccggcggcatggacgagctgtacaagtag

SEQ ID NO: 2094 - DNA, 20 bp, Artificial Sequence
  PAM sequence
cagggtcagggttctggata

SEQ ID NO: 2095 - DNA, 20 bp, Artificial Sequence
  PAM sequence
gcggttatgggcttgcatgt

SEQ ID NO: 2096 - DNA, 20 bp, Artificial Sequence
  PAM sequence
cagggtcagggttctggata

SEQ ID NO: 2097 - DNA, 20 bp, Artificial Sequence
  PAM sequence
cagacttgtcactggattta

SEQ ID NO: 2098 - DNA, 20 bp, Artificial Sequence
  PAM sequence
gagactctaaatccagtgac

SEQ ID NO: 2099 - DNA, 20 bp, Artificial Sequence
  PAM sequence
cggaacccaatcactgacag

SEQ ID NO: 2100 - DNA, 20 bp, Artificial Sequence
  PAM sequence
gagactctaaatccagtgac

SEQ ID NO: 2101 - DNA, 20 bp, Artificial Sequence
  PAM sequence
cagacttgtcactggattta

SEQ ID NO: 2102 - DNA, 20 bp, Artificial Sequence
  PAM sequence
gagactctaaatccagtgac

SEQ ID NO: 2103 - DNA, 20 bp, Artificial Sequence
  PAM sequence
aggtaagggcagctttggtg

SEQ ID NO: 2104 - DNA, 20 bp, Artificial Sequence
  PAM sequence
ggaacccaatcactgacagg

SEQ ID NO: 2105 - DNA, 20 bp, Artificial Sequence
  PAM sequence
ctaaatccagtgacaagtct

SEQ ID NO: 2106 - DNA, 20 bp, Artificial Sequence
  PAM sequence
tccagtgacaagtctgtctg

1. A method for inactivating alleles of the T Cell Receptor Alpha Constant (TRAC) gene in a cell, the method comprising
introducing to the cell a composition comprising:
at least one CRISPR nuclease, or a sequence encoding a CRISPR nuclease; and
an RNA molecule comprising a guide sequence portion,
wherein a complex of the CRISPR nuclease and the RNA molecule affects a double strand break in alleles of the TRAC gene,
wherein the guide sequence portion of the RNA molecule comprises 17-50 contiguous nucleotides containing nucleotides in the sequence set forth in any one of SEQ ID NOs: 1-1932.

2. The method of claim 1, wherein the composition is introduced to a cell in a subject or to a cell in culture.

3. The method of any one of claims 1-2, wherein the cell is a lymphocyte, a T cell, a T regulatory cell, a stem cell, or a fibroblast, blood cell, hepatocyte, keratinocyte, or any other cell type capable of being reprogrammed to an induced pluripotent stem cell (iPSC).

4. The method of any one of claims 1-2, wherein the cell is a hematopoietic stem cell (HSC), induced pluripotent stem cell (iPS cell), iPSc-derived cell, natural killer cell (NK), iPS-derived NK cell (iNK), T cell, innate-like T cell (iT), natural killer T cell (NKT), γ δ T cell, iPSc-derived T cell, invariant NKT cells (iNKT), iPSc-derived NKT, monocyte, or macrophage.

5. The method of any one of claims 1-4, wherein the CRISPR nuclease and the RNA molecule are introduced to the cell at substantially the same time or at different times.

6. The method of any one of claims 1-5, wherein alleles of the TRAC gene in the cell are subjected to an insertion or deletion mutation.

7. The method of claim 6, wherein the insertion or deletion mutation creates an early stop codon.

8. The method of any one of claims 1-7, wherein the inactivating results in a truncated protein encoded by the mutated allele.

9. The method of any one of claims 1-8, wherein the composition introduced to the cell further comprises a second RNA molecule comprising a guide sequence portion, wherein the guide sequence portion of the RNA molecule comprises 17-50 contiguous nucleotides containing nucleotides in the sequence set forth in any one of SEQ ID NOS: 1-1932.

10. A method for inactivating alleles of the T Cell Receptor Alpha Constant (TRAC) gene in a cell, the method comprising
introducing to the cell a composition comprising:
at least one CRISPR nuclease, or a sequence encoding a CRISPR nuclease; and
an RNA molecule comprising a guide sequence portion,
wherein a complex of the CRISPR nuclease and the RNA molecule affects a double strand break in alleles of the TRAC gene,
wherein the guide sequence portion of the RNA molecule comprises 17-50 contiguous nucleotides containing nucleotides in the sequence set forth in any one of SEQ ID NOs: 1-1932 modified to contain 1, 2, 3, 4, or 5 nucleotide mismatches relative to a fully-complementary target sequence of the guide sequence portion.

11. The method of claim 10, wherein the guide sequence portion of the RNA molecule comprises 1, 2, 3, 4, or 5 nucleotide mismatches relative to a fully-complementary target sequence of the guide sequence portion.

12. The method of any one of claim 10 or 11, wherein the guide sequence portion provides higher targeting specificity to the complex of the CRISPR nuclease and the RNA molecule relative to a guide sequence portion that has higher complementarity to an allele of the TRAC gene.

13. The method of any one of claims 10-12, wherein the composition introduced to the cell further comprises a second RNA molecule comprising a guide sequence portion, wherein the guide sequence portion of the RNA molecule comprises 17-50 contiguous nucleotides containing nucleotides in the sequence set forth in any one of SEQ ID NOs: 1-1932, or any one of SEQ ID NOs: 1-1932 modified to contain 1, 2, 3, 4, or 5 nucleotide mismatches relative to a fully-complementary target sequence of the guide sequence portion.

14. A composition comprising an RNA molecule which comprises 17-50 contiguous nucleotides containing nucleotides in the sequence set forth in any one of SEQ ID NOs: 1-1932.

15. The composition of claim 14, wherein the RNA molecule comprises 17-50 contiguous nucleotides containing nucleotides in the sequence set forth in any one of SEQ ID NOs: 459, 482, 499, 608, 696, 719, 724, 1590, 1596, 1620, 1671, 1673, 1690 and 1723.

16. The composition of claim 14, wherein the RNA molecule comprises 17-50 contiguous nucleotides containing nucleotides in the sequence set forth in any one of SEQ ID NOs: 1-1932 other than SEQ ID NOs: 459, 482, 499, 608, 696, 719, 724, 1590, 1596, 1620, 1671, 1673, 1690 and 1723.

17. The composition of any one of claims 13-15, further comprising a second RNA molecule which comprises 17-50 contiguous nucleotides containing nucleotides in the sequence set forth in any one of SEQ ID NOs: 1-1932, or any one of SEQ ID NOs: 1-1932 modified to contain 1, 2, 3, 4, or 5 nucleotide mismatches relative to a fully-complementary target sequence of the guide sequence portion.

18. The composition of claim 17, wherein the second RNA molecule which comprises 17-50 contiguous nucleotides containing nucleotides in the sequence set forth in any one of SEQ ID NOs: 459, 482, 499, 608, 696, 719, 724, 1590, 1596, 1620, 1671, 1673, 1690 and 1723.

19. The composition of claim 17, wherein the second RNA molecule which comprises 17-50 contiguous nucleotides containing nucleotides in the sequence set forth in any one of SEQ ID NOs: 1-1932 is other than SEQ ID NOs: 459, 482, 499, 608, 696, 719, 724, 1590, 1596, 1620, 1671, 1673, 1690 and 1723.

20. A composition comprising an RNA molecule which comprises 17-50 contiguous nucleotides containing nucleotides in the sequence set forth in any one of SEQ ID NOS: 1-1932, or any one of SEQ ID NOs: 1-1932 modified to contain 1, 2, 3, 4, or 5 nucleotide mismatches relative to a fully-complementary target sequence of the guide sequence portion.

21. The composition of claim 20, further comprising a second RNA molecule which comprises 17-50 contiguous nucleotides containing nucleotides in the sequence set forth in any one of SEQ ID NOs: 1-1932, or any one of SEQ ID NOs: 1-1932 modified to contain 1, 2, 3, 4, or 5 nucleotide mismatches relative to a fully-complementary target sequence of the guide sequence portion.

22. The composition of any one of claims 14-21, further comprising a CRISPR nuclease.

23. The composition of any one of claims 14-22, further comprising a tracrRNA molecule.

24. A cell modified by the method of any one of claims 1-13 or modified using the composition of any one of claims 14-23.

25. The modified cell of claim 24, wherein the cell is any one of a wherein the cell is a lymphocyte, a T cell, a T regulatory cell, a stem cell, or a fibroblast, blood cell, hepatocyte, keratinocyte, or any other cell type capable of being reprogrammed to an induced pluripotent stem cell (iPSC).

26. The modified cell of claim 24, wherein the cell is a hematopoietic stem cell (HSC), induced pluripotent stem cell (iPS cell), iPSc-derived cell, natural killer cell (NK), iPS-derived NK cell (iNK), T cell, innate-like T cell (iT), natural killer T cell (NKT), γ δ T cell, iPSc-derived T cell, invariant NKT cell (iNKT), iPSc-derived NKT, monocyte, or macrophage.

27. The modified cell of claim 24, wherein the cell is a stem cell or any cell type capable of being reprogrammed to an induced pluripotent stem cell (iPSC).

28. The modified cell of claim 27, wherein the stem cell is differentiated after it is modified.

29. The modified cell of claim 28, wherein the stem cell is differentiated into any one of a lymphocyte, a T cell, a T regulatory cell, a B cell, a natural killer (NK) cell, innate-like T cell (iT), natural killer T cells (NKT), γ δ T cell, invariant NKT cells (iNKT), monocyte, or macrophage.

30. A medicament comprising the composition of any one of claims 14-23 for use in inactivating a TRAC allele in a cell, wherein the medicament is administered by delivering to the cell the composition of any one of claims 14-23.

31. Use of the composition of any one of claims 14-23 or the modified cell of any one of claims 24-29 for treating, ameliorating, or preventing graft-versus-host-disease (GVHD), comprising delivering the composition of any one of claims 14-23 or the modified cell of any one of claims 24-29 to a subject experiencing or at risk of experiencing graft-versus-host-disease (GVHD).

32. A medicament comprising the composition of any one of claims 14-23 or the modified cell of any one of claims 24-29 for use in treating, ameliorating, or preventing graft-versus-host-disease (GVHD), wherein the medicament is administered by delivering the composition of any one of claims 14-23 or the modified cell of any one of claims 24-29 to a subject experiencing or at risk of experiencing graft-versus-host-disease (GVHD).

33. A kit for inactivating a TRAC allele in a cell, comprising the composition of any one of claims 14-23 and instructions for delivering the composition to the cell.

34. The kit of claim 33, wherein the composition is delivered to the cell ex vivo.

35. A kit for treating or preventing graft-versus-host-disease (GVHD) in a subject, comprising the composition of any one of claims 14-23 or the modified cell of any one of claims 24-29 and instructions for delivering the composition to a subject experiencing or at risk of experiencing graft-versus-host-disease (GVHD).
